United States Patent Application Publication US 2026/0109938 A1 - sequence listing, part 5

SEQ ID NO: 3 - DNA, 3977413 bp, Escherichia coli (residues 1-1,988,707 of 3,977,413)
  misc_feature 1..3977413: note = Synthetic E.coli genome
  source 1..3977413: mol_type = genomic DNA
agcttttcattctgactgcaacgggcaatatgtctctgtgtggattaaaaaaagagtgtctgatagcagcttctgaactggttacctgccgtgagtaaattaaaattttattgacttaggtcactaaatactttaaccaatataggcatagcgcacagacagataaaaattacagagtacacaacatccatgaaacgcattagcaccaccattaccaccaccatcaccattaccacaggtaacggtgcgggctgacgcgtacaggaaacacagaaaaaagcccgcacctgacagtgcgggctttttttttcgaccaaaggtaacgaggtaacaaccatgcgagtgttgaagttcggcggtacaagtgtggcaaatgcagaacgttttctgcgtgttgccgatattctggaaagcaatgccaggcaggggcaggtggccaccgtcctctctgcccccgccaaaatcaccaaccacctggtggcgatgattgaaaaaaccattagcggccaggatgctttacccaatatcagcgatgccgaacgtatttttgccgaacttttgacgggactcgccgccgcccagccggggttcccgctggcgcaattgaaaactttcgtcgatcaggaatttgcccaaataaaacatgtcctgcatggcattagtttgttggggcagtgcccggatagcatcaacgctgcgctgatttgccgtggcgagaaaatgagcatcgccattatggccggcgtattagaagcgcgcggtcacaacgttactgttatcgatccggtcgaaaaactgctggcagtggggcattacctcgaatctaccgtcgatattgctgagtccacccgccgtattgcggcaagccgcattccggctgatcacatggtgctgatggcaggtttcaccgccggtaatgaaaaaggcgaactggtggtgcttggacgcaacggttccgactactctgctgcggtgctggctgcctgtttacgcgccgattgttgcgagatttggacggacgttgacggggtctatacctgcgacccgcgtcaggtgcccgatgcgaggttgttgaagagcatgtcctaccaggaagcgatggagctttcctacttcggcgctaaagttcttcacccccgcaccattacccccatcgcccagttccagatcccttgcctgattaaaaataccggaaatcctcaagcaccaggtacgctcattggtgccagccgtgatgaagacgaattaccggtcaagggcatttccaatctgaataacatggcaatgttcagcgtttctggtccggggatgaaagggatggtcggcatggcggcgcgcgtctttgcagcgatgagtcgcgcccgtatttccgtggtgctgattacgcaaagttcttccgaatacagcatcagtttctgcgttccacaaagcgactgtgtgcgagctgaacgggcaatgcaggaagagttctacctggaactgaaagaaggcttactggagccgctggcagtgacggaacggctggccattatcagcgtggtaggtgatggtatgcgcaccttgcgtgggatcagcgcgaaattctttgccgcactggcccgcgccaatatcaacattgtcgccattgctcagggatcttctgaacgcagtatctctgtcgtggtaaataacgatgatgcgaccactggcgtgcgcgttactcatcagatgctgttcaataccgatcaggttatcgaagtgtttgtgattggcgtcggtggcgttggcggtgcgctgctggagcaactgaagcgtcagcaaagctggctgaagaataaacatatcgacttacgtgtctgcggtgttgccaacagcaaggctctgctcaccaatgtacatggccttaatctggaaaactggcaggaagaactggcgcaagccaaagagccgtttaatctcgggcgcttaattcgcctcgtgaaagaatatcatctgctgaacccggtcattgttgactgcacttccagccaggcagtggcggatcaatatgccgacttcctgcgcgaaggtttccacgttgtcacgccgaacaaaaaggccaacaccagcagcatggattactaccatcagttgcgttatgcggcggaaaaaagccggcgtaaattcctctatgacaccaacgttggggctggattaccggttattgagaacctgcaaaatctgctcaatgcaggtgatgaattgatgaagttctccggcattctttctggtagcctttcttatatcttcggcaagttagacgaaggcatgagtttctccgaggcgaccacgctggcgcgggaaatgggttataccgaaccggacccgcgagatgatctttctggtatggatgtggcgcgtaaactattgattctcgctcgtgaaacgggacgtgaactggagctggcggatattgaaattgaacctgtgctgcccgcagagtttaacgccgagggtgatgttgccgcttttatggcgaatctgagtcaactcgacgatctctttgccgcgcgcgtggcgaaggcccgtgatgaaggaaaagttttgcgctatgttggcaatattgatgaagatggcgtctgccgcgtgaagattgccgaagtggatggtaatgatccgctgttcaaagtgaaaaatggcgaaaacgccctggccttctatagccactattatcagccgctgccgttggtactgcgcggatatggtgcgggcaatgacgttacagctgccggtgtctttgctgatctgctacgtaccctcagttggaagttaggagtctgacatggttaaagtttatgccccggcttccagtgccaatatgagcgtcgggtttgatgtgctcggggcggcggtgacacctgttgatggtgcattgctcggagatgtagtcacggttgaggcggcagagacattcagtctcaacaacctcggacgctttgccgataagctgccgagtgaaccacgggaaaatatcgtttatcagtgctgggagcgtttttgccaggaactgggtaagcaaattccagtggcgatgaccctggaaaagaatatgccgatcggtagcggcttaggctccagtgcctgtagcgtggtcgcggcgctgatggcgatgaatgaacactgcggcaagccgcttaatgacactcgtttgctggctttgatgggcgagctggaaggccgtatctccggcagcattcattacgacaacgtggcaccgtgttttctcggtggtatgcagttgatgatcgaagaaaacgacatcatcagccagcaagtgccagggtttgatgagtggctgtgggtgctggcgtatccggggattaaagtcagcacggcagaagccagggctattttaccggcgcagtatcgccgccaggattgcattgcgcacgggcgacatctggcaggcttcattcacgcctgctattcccgtcagcctgagcttgccgcgaagctgatgaaagatgttatcgctgaaccctaccgtgaacggttactgccaggcttccggcaggcgcggcaggcggtcgcggaaatcggcgcggtagcgagcggtatctccggctccggcccgaccttgttcgctctgtgtgacaagccggaaaccgcccagcgcgttgccgactggttgggtaagaactacctgcaaaatcaggaaggttttgttcatatttgccggctggatacggcgggcgcacgagtactggaaaactaaatgaaactctacaatctgaaagatcacaacgagcaggtcagctttgcgcaagccgtaacccaggggttgggcaaaaatcaggggctgttttttccgcacgacctgccggaattcagcctgactgaaattgatgagatgctgaagctggattttgtcacccgcagtgcgaagatcctcagcgcgtttattggtgatgaaatcccacaggaaatcctggaagagcgcgtgcgcgcggcgtttgccttcccggctccggtcgccaatgttgaaagcgatgtcggttgtctggaattgttccacgggccaacgctggcatttaaagatttcggcggtcgctttatggcacaaatgctgacccatattgcgggtgataagccagtgaccattctgaccgcgacctccggtgataccggagcggcagtggctcatgctttctacggtttaccgaatgtgaaagtggttatcctctatccacgaggcaaaatcagtccactgcaagaaaaactgttctgtacattgggcggcaatatcgaaactgttgccatcgacggcgatttcgatgcctgtcaggcgctggtgaagcaggcgtttgatgatgaagaactgaaagtggcgctagggttaaacagcgctaacagcattaacatcagccgtttgctggcgcagatttgctactactttgaagctgttgcgcagctgccgcaggagacgcgcaaccagctggttgtcagcgtgccaagcggaaacttcggcgatttgacggcgggtctgctggcgaagagtctcggtctgccggtgaaacgttttattgctgcgaccaacgtgaacgataccgtgccacgtttcctgcacgacggtcagtggagtcccaaagcgactcaggcgacgttatccaacgcgatggacgtgagtcagccgaacaactggccgcgtgtggaagagttgttccgccgcaaaatctggcaactgaaagagctgggttatgcagccgtggatgatgaaaccacgcaacagacaatgcgtgagttaaaagaactgggctacactagcgagccgcacgctgccgtagcttatcgtgcgctgcgtgatcagttgaatccaggcgaatatggcttgttcctcggcaccgcgcatccggcgaaatttaaagagagcgtggaagcgattctcggtgaaacgttggatctgccaaaagagctggcagaacgtgctgatttacccttgcttagtcataatctgcccgccgattttgctgcgttgcgtaaattgatgatgaatcatcagtaaaatctattcattatctcaatcaggccgggtttgcttttatgcagcccggcttttttatgaagaaattatggagaaaaatgacagggaaaaaggagaaattctcaataaatgcggtaacttagagattaggattgcggagaataacaaccgccgttctcatcgagtaatctccggatatcgacccataacgggcaatgataaaaggagtaacctgtgaaaaagatgcaatctatcgtactcgcactttccctggttctggtcgctcccatggcagcacaggctgcggaaattacgttagtcccgagtgtaaaattacagataggcgatcgtgataatcgtggctattactgggatggaggtcactggcgcgaccacggctggtggaaacaacattatgaatggcgaggcaatcgctggcacctacacggaccgccgccaccgccgcgccaccataagaaagctcctcatgatcatcacggcggtcatggtccaggcaaacatcaccgctaaatgacaaatgccgggtaacaatccggcattcagcgcctgatgcgacgctggcgcgtcttatcaggcctacgttaattctgcaatatattgaatctgcatgcttttgtaggcaggataaggcgttcacgccgcatccggcattgactgcaaacttaacgctgctcgtagcgtttaaacaccagttcgccattgctggaggaatcttcatcaaagaagtaaccttcgctattaaaaccagtcagttgctctggtttggtcagccgattttcaataatgaaacgactcatcagaccgcgtgctttcttagcgtagaagctgatgatcttaaatttgccgttcttctcatcgaggaacaccggcttgataatctcggcattcaatttcttcggcttcacgcttttaaaatactcatcactcgccagattaatcaccacattatcgccttgtgctgcgagcgcctcgttcagcttgttggtgatgatatctccccagaattgatacagatctttccctcgggcattctcaagacggatccccatttccagacgataaggctgcattaaatcgagcgggcggagtacgccatacaagccggaaagcattcgcaaatgctgttgggcaaaatcgaaatcgtcttcgctgaaggtttcggcctgcaagccggtgtagacatcacctttaaacgccagaatcgcctggcgggcattcgccggcgtgaaatctggctgccagtcatgaaagcgagcggcgttgatacccgccagtttgtcgctgatgcgcatcagcgtgctaatctgcggaggcgtcagtttccgcgcctcatggatcaactgctgggaattgtctaacagctccggcagcgtatagcgcgtggtggtcaacgggctttggtaatcaagcgttttcgcaggactaataagaatcagcatatccagtccttgcaggaaatttatgccgactttagcaaaaaatgagaatgagttgatcgatagttgtgattactcctggctaacatcatcccacgcgtccggagaaagctggcgaccgatatccggataacgcaatggatcaaacaccgggcgcacgccgagtttacgctggcgtagataatcactggcaatggtatgaaccacagggctgagcagtaaaatggcggtcaaattggtaatagccatgcaggccattatgatatctgccagttgccacatcagcggaaggcttagcaaggtgccgccgatgaccgttgcgaaggtgcagatccgcaaacaccagatcgctttagggttgttcaggcgtaaaaagaagagattgttttcggcataaatgtagttggcaacgatggagctgaaggcaaacagaataaccacaagggtaacaaactcagcaccccaggaacccattagcacccgcatcgccttctggataagctgaataccttccagcggcatgtaggttgtgccgttacccgccagtaatatcagcatggcgcttgccgtacagatgaccagggtgtcgataaaaatgccaatcatctggacaatcccttgcgctgccggatgcggaggccaggacgccgctgccgctgccgcgtttggcgtgctacccattcccgcctcattggaaaacatactgcgctgaaaaccgttagtaatcgcctggcttaaggtatatcccgccgcgccgcctgccgcttcctgccagccaaaagcactctcaaaaatagaccaaatgacgtggggaagttgcccgatattcattacgcaaattaccaggctggtcagtacccagattatcgccatcaacgggacaaagccctgcatgagccgggcgacgccatgaagaccgcgagtgattgccagcagagtaaagacagcgagaataatgcctgtcaccagcgggggaaaatcaaaagaaaaactcagggcgcgggcaacggcgttcgcttgaactccgctgaaaattatgccataggcgatgagcaaaaagacggcgaacagaacgcccatccagcgcatccccagcccgcgcgccatataccatgccggtccgccacgaaactgcccattgacgtcacgttctttataaagttgtgccagagaacattcggcaaagctggtcgccatgccgataaacgcggcaacccacatccaaaagacggctccaggtccaccggcggtaatagccagcgcaacgccggccaggttgccgctacccacgcgcgccgcaagactggtacacaaactctgaaaactggttaaaccgcctggctgtggatgaatgctatttttaagacttttgccaaactggcggatgtagcgaaactgcacaaatccggtgcgaaaagtgaaccaacaacctgcgccgaagagcaggtaaatcattacgcttccccaaaggacgctgttaatgaaggagaaaaaatctggcatgcatatccctcttattgccggccgcgatgactttcctgtgtaaacgttaccaattgtttaagaagtatatacgctacgaggtacttgataacttctgcgtagcatacatgaggttttgtataaaaatggcgggcgatatcaacgcagtgtcagaaatccgaaacagtctcgcctggcgataaccgtcttgtcggcggttgcgctgacgttgcgtcgtgatatcatcagggcagaccggttacatccccctaacaagctgtttaaagagaaatactatcatgacggacaaattgacctcccttcgtcagtacaccaccgtagtggccgacactggggacatcgcggcaatgaagctgtatcaaccgcaggatgccacaaccaacccttctctcattcttaacgcagcgcagattccggaataccgtaagttgattgatgatgctgtcgcctgggcgaaacagcagagcaacgatcgcgcgcagcagatcgtggacgcgaccgacaaactggcagtaaatattggtctggaaatcctgaaactggttccgggccgtatcagtactgaagttgatgcgcgtctttcctatgacaccgaagcgagtattgcgaaagcaaaacgcctgatcaaactctacaacgatgctggtattagcaacgatcgtattctgatcaaactggcttctacctggcagggtatccgtgctgcagaacagctggaaaaagaaggcatcaactgtaacctgaccctgctgttctccttcgctcaggctcgtgcttgtgcggaagcgggcgtgttcctgatcagcccgtttgttggccgtattcttgactggtacaaagcgaataccgataagaaagagtacgctccggcagaagatccgggcgtggtttctgtatctgaaatctaccagtactacaaagagcacggttatgaaaccgtggttatgggcgcaagcttccgtaacatcggcgaaattctggaactggcaggctgcgaccgtctgaccatcgcaccggcactgctgaaagagctggcggagagcgaaggggctatcgaacgtaaactgtcttacaccggcgaagtgaaagcgcgtccggcgcgtatcactgagtccgagttcctgtggcagcacaaccaggatccaatggcagtagataaactggcggaaggtatccgtaagtttgctattgaccaggaaaaactggaaaaaatgatcggcgatctgctgtaatcattcttagcgtgaccgggaagtcggtcacgctacctcttctgaagcctgtctgtcactcccttcgcagtgtatcattctgtttaacgagactgtttaaacggaaaaatcttgatgaatactttacgtattggcttagtttccatctctgatcgcgcatccagcggcgtttatcaggataaaggcatccctgcgctggaagaatggctgacaagcgcgctaaccacgccgtttgaactggaaacccgcttaatccccgatgagcaggcgatcatcgagcaaacgttgtgtgagctggtggatgaaatgagttgccatctggtgctcaccacgggcggaactggcccggcgcgtcgtgacgtaacgcccgatgcgacgctggcagtagcggaccgcgagatgcctggctttggtgaacagatgcgccagatcagcctgcattttgtaccaactgcgatccttagccgtcaggtgggcgtgattcgcaaacaggcgctgatccttaacttacccggtcagccgaagtctattaaagagacgctggaaggtgtgaaggacgctgagggtaacgttgtggtacacggtatttttgccagcgtaccgtactgcattcagttgctggaagggccatacgttgaaacggcaccggaagtggttgcagcattcagaccgaagagtgcaagacgcgacgttagcgaataaaaaaatccccccgagcggggggatctcaaaacaattagtgggattcaccaatcggcagaacggtgcgaccaaactgctcgttcagtacttcacccatcgccagatagattgcgctggcaccgcagatcagcccaatccagccggcaaagtggatgattgcggcgttaccggcaatgttaccgatcgccagcagggcaaacagcacggtcaggctaaagaaaacgaattgcagaacgcgtgcgcctttcagcgtgccgaagaacataaacagcgtaaatacgccccacagacccaggtagacaccaaggaactgtgcatttggcgcatcggtcagacccagtttcggcatcagcagaatcgcaaccagcgtcagccagaaagaaccgtaagaggtgaatgcggttaaaccgaaagtgttgccttttttgtactccagcagaccagcaaaaatttgcgcgatgccgccgtagaaaatgcccatggcaagaataatgccgtccagagcgaaataacccacgttgtgcaggttaagcagaatggtggtcatgccgaagcccatcaggcccagcggtgccggattagccaacttagtgttgcccataattcctcaaaaatcatcatcgaatgaatggtgaaataatttccctgaataactgtagtgttttcagggcgcggcataataatcagccagtggggcagtgtctacgatcttttgaggggaaaatgaaaattttccccggtttccggtatcagacctgagtggcgctaaccatccggcgcaggcaggcgatttgcagtacggctggaatcgtcacgcgataggcgctgccgctgaccgctttaaccccatttagtgccgcacctacagggcctcccagccccgcgccgcgcagcaaaccatgcccaagtacgctcattgctgcgtgggtgcgtaaaatgcgggtcagttggctggaaagcaaatggctcacaccttttgccaataatttgtctttcatcagcagcggcagcagctcttccagctcattcaccctggcatcgaccgcgtgcagaaactcctgcttatgttcctcgtccattttcttccaggtattacgcagaaattgttccagtaactgttgctcaatttcaaacgtagacatctctttgtcggctttcagcttcaatcgcttactaacatcgagcaaaatggcccgatacaatttaccgtgtccgcgcagtttgttggcgatactatcgccaccaaaatgctgtaattctccggcaatcagctgccagttgcggcgatgttgctcgggatgcccttccatgcttttaaacagttcgttgcgcatcagtacgctggagaggcgagttttgcctttttcattatgggtgagcaatcgggcgaaatttgccaactgttcctcactacaatgctgaagaaaatccagatcactatcattcaggtaattaacattcattttttgtggcttctatattctggcgttagtcgtcgccgataattttcagcgtggccatatcgctactgttcaccgtatgaccgctaaaggtgattttactgacgcagcgtttattgtcgttatcgctgttaatgttgatccagtcagtggtttgcccttcttttatttcactaggaatattcaggctctgactggcgctacgggcggctttgaaataaacgcttgcaccgcttaactgtaaatcgccatggtcggcagagagttgtatgcgtttcacaatgcgacaaacaggaagtttcagcgccagatcgttggtttcgttacgcggcattgcaatggcgccgaggagtttatggtcgtttgcctgcgccgtgcagcacagcatcaggctaatcgccaggctggcggaaatcgtaaaaacggatttcataaggattctcttagtgggaagaggtagggggatgaatacccactagtttactgctgataaagagaagattcaggcacgtaatcttttctttttattacaattttttgatgaatgccttggctgcgattcattctttatatgaataaaattgctgtcaattttacgtcttgtcctgccatatcgcgaaatttctgcgcaaaagcacaaaaaatttttgcatctcccccttgatgacgtggtttacgaccccatttagtagtcaaccgcagtgagtgagtctgcaaaaaaatgaaattgggcagttgaaaccagacgtttcgcccctattacagactcacaaccacatgatgaccgaatatatagtggagacgtttagatgggtaaaataattggtatcgacctgggtactaccaactcttgtgtagcgattatggatggcaccactcctcgcgtgctggagaacgccgaaggcgatcgcaccacgccttctatcattgcctatacccaggatggtgaaactctagttggtcagccggctaaacgtcaggcagtgacgaacccgcaaaacactctgtttgcgattaaacgcctgattggtcgccgcttccaggacgaagaagtacagcgtgatgtttccatcatgccgttcaaaattattgctgctgataacggcgacgcatgggtcgaagttaaaggccagaaaatggcaccgccgcagatttctgctgaagtgctgaaaaaaatgaagaaaaccgctgaagattacctgggtgaaccggtaactgaagctgttatcaccgtaccggcatactttaacgatgctcagcgtcaggcaaccaaagacgcaggccgtatcgctggtctggaagtaaaacgtatcatcaacgaaccgaccgcagctgcgctggcttacggtctggacaaaggcactggcaaccgtactatcgcggtttatgacctgggtggtggtactttcgatatttctattatcgaaatcgacgaagttgacggcgaaaaaaccttcgaagttctggcaaccaacggtgatacccacctggggggtgaagacttcgacagccgtctgatcaactatctggttgaagaattcaagaaagatcagggcattgacctgcgcaacgatccgctggcaatgcagcgcctgaaagaagcggcagaaaaagcgaaaatcgaactgtcttccgctcagcagaccgacgttaacctgccatacatcactgcagacgcgaccggtccgaaacacatgaacatcaaagtgactcgtgcgaaactggaaagcctggttgaagatctggtaaaccgttccattgagccgctgaaagttgcactgcaggacgctggcctgtccgtatctgatatcgacgacgttatcctcgttggtggtcagactcgtatgccaatggttcagaagaaagttgctgagttctttggtaaagagccgcgtaaagacgttaacccggacgaagctgtagcaatcggtgctgctgttcagggtggtgttctgactggtgacgtaaaagacgtactgctgctggacgttaccccgctgtctctgggtatcgaaaccatgggcggtgtgatgacgacgctgatcgcgaaaaacaccactatcccgaccaagcacagccaggtgttctctaccgctgaagacaaccagtctgcggtaaccatccatgtgctgcagggtgaacgtaaacgtgcggctgataacaaatctctgggtcagttcaacctagatggtatcaacccggcaccgcgcggcatgccgcagatcgaagttaccttcgatatcgatgctgacggtatcctgcacgtttccgcgaaagataaaaacagcggtaaagagcagaagatcaccatcaaggcttcttctggtctgaacgaagatgaaatccagaaaatggtacgcgacgcagaagctaacgccgaagctgaccgtaagtttgaagagctggtacagactcgcaaccagggcgaccatctgctgcacagcacccgtaagcaggttgaagaagcaggcgacaaactgccggctgacgacaaaactgctatcgagtctgcgctgactgcactggaaactgctctgaaaggtgaagacaaagccgctatcgaagcgaaaatgcaggaactggcacaggtttcccagaaactgatggaaatcgcccagcagcaacatgcccagcagcagactgccggtgctgatgcttctgcaaacaacgcgaaagatgacgatgttgtcgacgctgaatttgaagaagtcaaagacaaaaaataatcgccctataaacgggtaattatactgacacgggcgaaggggaatttcctctccgcccgtgcattcatctaggggcaatttaaaaaagatggctaagcaagattattacgagattttaggcgtttccaaaacagcggaagagcgtgaaatcagaaaggcctacaaacgcctggccatgaaataccacccggaccgtaaccagggtgacaaagaggccgaggcgaaatttaaagagatcaaggaagcttatgaagttctgaccgacagccaaaaacgtgcggcatacgatcagtatggtcatgctgcgtttgagcaaggtggcatgggcggcggcggttttggcggcggcgcagacttcagcgatatttttggtgacgttttcggcgatatttttggcggcggacgtggtcgtcaacgtgcggcgcgcggtgctgatttacgctataacatggagctcaccctcgaagaagctgtacgtggcgtgaccaaagagatccgcattccgactctggaagagtgtgacgtttgccacggtagcggtgcaaaaccaggtacacagccgcagacttgtccgacctgtcatggttctggtcaggtgcagatgcgccagggattcttcgctgtacagcagacctgtccacactgtcagggccgcggtacgctgatcaaagatccgtgcaacaaatgtcatggtcatggtcgtgttgagcgcagcaaaacgctgtccgttaaaatcccggcaggggtggacactggagaccgcatccgtcttgcgggcgaaggtgaagcgggcgagcatggcgcaccggcaggcgatctgtacgttcaggttcaggttaaacagcacccgattttcgagcgtgaaggcaacaacctgtattgcgaagtcccgatcaacttcgctatggcggcgctgggtggcgaaatcgaagtaccgacccttgatggtcgcgtcaaactgaaagtgcctggcgaaacccagaccggtaagctattccgtatgcgcggtaaaggcgtcaagtctgtccgcggtggcgcacagggtgatttgctgtgccgcgttgtcgtcgaaacaccggtaggcctgaacgaaaggcagaaacagctgctgcaagagctgcaagaaagcttcggtggcccaaccggcgagcacaacagcccgcgcagtaagagcttctttgatggtgtgaagaagttttttgacgacctgacccgctaacctccccaaaagcctgcccgtgggcaggcctgggtaaaaatagggtgcgttgaagatatgcgagcacctgtaaagtggcggggatcactctacctcaatgtgtatcacaatatccatattctttgtgggggagtctggagattgagtagatattcttgttcagaatgtatcagccgatggttctacgattcttaagccacgaagagttcagatagtacaacggcatgtctcttttgactatctggcaaccggcagtgtgttctctcacgcatcacaaaagcagcaggcataaaaaaacccgcttgcgcgggctttttcacaaagcttcagcaaattggcgattaagccagtttgttgatctgtgcagtcaggttagccttatgacgtgcagctttgtttttgtggatcagacctttagcagcctgacggtccacgatcggttgcatttcgttaaatgctttctgtgcagcagctttgtcgccagcttcgatagctgcgtatactttcttgatgaaagtacgcatcatagagcgacggcttgcgttgtgcttacgagccttttcagactgaatggcgcgcttcttagcacttttgatattagccaaggtccaactcccaaatgtgttctatatggacaattcaaaggccgaggaatatgcccttttagccttcttttgtcaatggatttgtgcaaataagcgccgttaatgtgccggcacagcttacgtagtgatggcgcaggattctaccagcttgcggggtgtgaatacagcttttccgcgataaaaattgcagcaggcggtcagtttcttcccgtgatttgcgccatggcaatgaaaagccacttctttctgattagcgtactcaatcgccggttaaccttgaccgctgtacaaggtatactcggacgatttagcctgttttgagccagacatgaagctgatacgcggcatacataatctcagccaggccccgcaagaagggtgtgtgctgactattggtaatttcgacggcgtgcatcgcggtcatcgcgcgctgttacagggcttgcaggaagaagggcgcaagcgcaacttaccggtgatggtgatgctttttgaacctcaaccactggaactgtttgctaccgataaagccccggcaagactgacccggctgcgggaaaaactgcgttaccttgcagagtgtggcgttgattacgtgctgtgcgtgcgtttcgacaggcgtttcgcggcgttaaccgcgcaaaatttcatcagcgatcttctggtgaagcatttgcgcgtaaaatttcttgccgtaggtgatgatttccgctttggcgctggtcgtgaaggcgatttcttgttattacagaaagctggcatggaatacggcttcgatatcaccagtacgcaaactttttgcgaaggtggcgtgcgcatcagcagcaccgccgtgcgtcaggcccttgcggatgacaatctggctctggcagagagtttactggggcacccgtttgccatctccgggcgtgtagtccacggtgatgaattagggcgcactataggtttcccgacggcgaatgtaccgctgcgccgtcaggtttccccggtgaaaggggtttatgcggtagaagtgctgggcctcggtgaaaagccgttacccggcgtggcaaacatcggaacacgcccaacggttgccggtattcgccagcagctggaagtgcatttgttagatgttgcaatggacctttacggtcgccatatacaagtagtgctgcgtaaaaaaatacgcaatgagcagcgatttgcgagcctggacgaactgaaagcgcagattgcgcgtgatgaattaaccgcccgcgaattttttgggctaacaaaaccggcttaagcctgttatgtaatcaaaccgaaatacggaaccgagaatctgatgagtgactataaaagtaccctgaatttgccggaaacagggttcccgatgcgtggcgatctcgccaagcgcgaacccggaatgctggcgcgttggactgatgatgatctgtacggcatcatccgtgcggctaaaaaaggcaaaaaaaccttcattctgcatgatggccctccttatgcgaatggcagcattcatattggtcacagcgttaacaagattctgaaagacattatcgtgaagtccaaagggctttccggttatgacagcccgtatgtgcctggctgggactgccacggtctgccgatcgagctgaaagtcgagcaagaatacggtaagccgggtgagaaattcaccgccgccgagttccgcgccaagtgccgcgaatacgcggcgacccaggttgacggtcaacgcaaagactttatccgtctgggcgtgctgggcgactggagccacccgtacctgaccatggacttcaaaactgaagccaacatcatccgcgcgctgggcaaaatcatcggcaacggtcacctgcacaaaggcgcgaagccagttcactggtgcgttgactgccgttctgcgctggcggaagcggaagttgagtattacgacaaaacttctccgtccatcgacgttgctttccaggcagtcgatcaggatgcactgaaagcaaaatttgccgtaagcaacgttaacggcccaatcagcctggtaatctggaccaccacgccgtggactctgcctgccaaccgcgcaatctctattgcaccagatttcgactatgcgctggtgcagatcgacggtcaggccgtgattctggcgaaagatctggttgaaagcgtaatgcagcgtatcggcgtgaccgattacaccattctcggcacggtaaaaggtgcggagcttgagctgctgcgctttacccatccgtttatgggcttcgacgttccggcaatcctcggcgatcacgttaccctggatgccggtaccggtgccgttcacaccgcgcctggccacggcccggacgactatgtgatcggtcagaaatacggcctggaaaccgctaacccggttggcccggacggcacttatctgccgggcacttatccgacgctggatggcgtgaacgtcttcaaagcgaacgacatcgtcgttgcgctgctgcaggaaaaaggcgcgctgctgcacgttgagaaaatgcagcacagctatccgtgctgctggcgtcacaaaacgccgatcatcttccgcgcgacgccgcagtggttcgtcagcatggatcagaaaggtctgcgtgcgcagagtctgaaagagatcaaaggcgtgcagtggatcccggactggggccaggcgcgtatcgagagcatggttgctaaccgtcctgactggtgtatctcccgtcagcgcacctggggtgtaccgatgagtctgttcgtgcacaaagacacggaagagctgcatccgcgtacccttgaactgatggaagaagtggcaaaacgcgttgaagtcgatggcatccaggcgtggtgggatctcgatgcgaaagagatcctcggcgacgaagctgatcagtacgtgaaagtgccggacacattggatgtatggtttgactccggatctacccactcttctgttgttgacgtgcgtccggaatttgccggtcacgcagcggacatgtatctggaaggttctgaccaacaccgcggctggttcatgtcttccctaatgatctccaccgcgatgaagggtaaagcgccgtatcgtcaggtactgacccacggctttaccgtggatggtcagggccgcaagatgtctaaatccatcggcaataccgttagcccgcaggatgtgatgaacaaactgggcgcggatattctgcgtctgtgggtggcaagtaccgactacaccggtgaaatggccgtttctgacgagatcctgaaacgtgctgccgatagctatcgtcgtatccgtaacaccgcgcgcttcctgctggcaaacctgaacggttttgatccagcaaaagatatggtgaaaccggaagagatggtggtactggatcgctgggccgtaggttgtgcgaaagcggcacaggaagacatcctcaaggcgtacgaagcatacgatttccacgaagtggtacagcgtctgatgcgcttctgctccgttgagatgggttccttctacctcgacatcatcaaagaccgtcagtacaccgccaaagcggacagtgtggcgcgtcgtagctgccagactgcgctatatcacatcgcagaagcgctggtgcgctggatggcaccaatcctctccttcaccgctgatgaagtgtggggctacctgccgggcgaacgtgaaaaatacgtcttcaccggtgagtggtacgaaggcctgtttggcctggcagacagtgaagcgatgaacgatgcgttctgggacgagctgttgaaagtgcgtggcgaagtgaacaaagtcattgagcaagcgcgtgccgacaagaaagtgggtggcagcctggaagcggcagtaaccttgtatgcagaaccggaactgagcgcgaaactgaccgcgctgggcgatgaattacgatttgtcctgttgacctccggcgctaccgttgcagactataacgacgcacctgctgatgctcagcagagcgaagtactcaaagggctgaaagtcgcgttgagtaaagccgaaggtgagaagtgcccacgctgctggcactacacccaggatgtcggcaaggtggcggaacacgcagaaatctgcggccgctgtgtcagcaacgtcgccggtgacggtgaaaaacgtaagtttgcctgatgagtcaaagcatctgtagtacagggctacgctggctgtggctggtggtagtcgtgctgattatcgatctgggcagcaaatacctgatcctccagaactttgctctgggggatacggtcccgctgttcccgagccttaatctgcattatgcgcgtaactatggcgcggcgtttagtttccttgccgatagcggcggctggcagcgttggttctttgccggtattgcgattggtattagcgtgatcctggcagtgatgatgtatcgcagcaaggccacgcagaagctaaacaatatcgcttacgcgctgattattggcggcgcgctgggcaacctgttcgaccgcctgtggcacggcttcgttgtcgatatgatcgacttctacgtcggcgactggcacttcgccaccttcaaccttgccgatactgccatctgtgtcggtgcggcactgattgtgctggaaggttttttgccttctagagcgaaaaaacaataataaaccctgccggatgcgatgctgacgcatcttatccggcctacagattgctgcgaaatcgtaggccggataaggcgtttacgccgcatccggcaaaaatccttaaatataagagcaaacctgcatgtctgaatctgtacagagcaatagcgccgtcctggtgcacttcacgctaaaactcgacgatggcaccaccgccgagtctacccgcaacaacggtaaaccggcgctgttccgcctgggtgatgcttctctttctgaagggctggagcaacacctgttggggctgaaagtgggcgataaaaccaccttcagcttggagccagatgcggcgtttggcgtgccgagtccggacctgattcagtacttctcccgccgtgaatttatggatgcaggcgagccagaaattggcgcaatcatgctttttaccgcaatggatggcagtgagatgcctggcgtgatccgcgaaattaacggcgactccattaccgttgatttcaaccatccgctggccgggcagaccgttcattttgatattgaagtgctggaaatcgatccggcactggaggcgtaacatgcagatcctgttggccaacccgcgtggtttttgtgccggggtagaccgcgctatcagcattgttgaaaacgcgctggccatttacggcgcaccgatatatgtccgtcacgaagtggtacataaccgctatgtggtcgatagcttgcgtgagcgtggggctatctttattgagcagattagcgaagtaccggacggcgcgatcctgattttctccgcacacggtgtttctcaggcggtacgtaacgaagcaaaaagtcgcgatttgacggtgtttgatgccacctgtccgctggtgaccaaagtgcatatggaagtcgcccgcgccagtcgccgtggcgaagaatctattctcatcggtcacgccgggcacccggaagtggaagggacaatgggccagtacagtaacccggaagggggaatgtatctggtcgaaagcccggacgatgtgtggaaactgacggtcaaaaacgaagagaagctctcctttatgacccagaccacgctgagcgtggatgacacgtctgatgtgatcgacgcgctgcgtaaacgcttcccgaaaattgtcggtccgcgcaaagatgacatctgctacgccacgactaaccgtcaggaagcggtacgcgccctggcagaacaggcggaagttgtgttggtggtcggtagcaaaaactcctccaactccaaccgtctggcggagctggcccagcgtatgggcaaacgcgcgtttttgattgacgatgcgaaagacatccaggaagagtgggtgaaagaggttaaatgcgtcggcgtgactgcgggcgcaagcgctccggatattctggtgcagaatgtggtggcgcgtttgcagcagctgggcggtggtgaagccattccgctggaaggccgtgaagaaaacattgttttcgaagtgccgaaagagctgcgtgtcgatattcgtgaagtcgattaagtcattagcagcctaagttatgcgaaaatgccggtcttgttaccggcattttttatggagaaaacatgcgtttacctatcttcctcgatactgaccccggcattgacgatgccgtcgccattgccgccgcgatttttgcacccgaactcgacctgcaactgatgaccaccgtcgcgggtaatgtcagcgttgagaaaactacccgcaatgccctgcaactgctgcatttctggaatgcggagattccgctcgcccaaggggccgctgtgccactggtacgcgcaccgcgtgatgcggcatctgtgcacggcgaaagcggaatggctggctacgactttgttgagcacaaccgaaagccgctcgggataccggcgtttctggcgattcgggatgccctgatgcgtgcaccagagcctgttaccctggtggccatcggcccgttaaccaatattgcgctgttacttagtcaatgcccggaatgcaagccgtatattcgccgtctggtgatcatgggtggttctgccggacgcggcaactgtacgccaaacgccgagtttaatattgctgccgatccagaagctgctgcctgtgtcttccgcagtggtattgaaatcgtcatgtgcggtttggatgtcaccaatcaggcaatattaactcctgactatctctctacactgccgcagttaaaccgtaccgggaaaatgcttcacgccctgtttagccactaccgtagcggcagtatgcaaagcggcttgcgaatgcacgatctctgcgccatcgcctggctggtgcgcccggacctgttcactctcaaaccctgttttgtggcagtggaaactcagggcgaatttaccagtggcacgacggtggttgatatcgacggttgcctgggcaagccagccaatgtacaggtggcattggatctggatgtgaaaggcttccagcagtgggtggctgaggtgctggctctggcgagctaacctgtcacatgttattggcatgcagtcattcatcgactcatgcctttcactgatatccctccctgtttatcattaatttctaattatcagcgtttttggctggcggcgtagcgatgcgctggttactctgaaaacggtctatgcaaattaacaaaagagaatagctatgcatgatgcaaacatccgcgttgccatcgcgggagccggggggcgtatgggccgccagttgattcaggcggcgctggcattagagggcgtgcagttgggcgctgcgctggagcgtgaaggatcttctttactgggcagcgacgccggtgagctggccggagccgggaaaacaggcgttaccgtgcaaagcagcctcgatgcggtaaaagatgattttgatgtgtttatcgattttacccgtccggaaggtacgctgaaccatctcgctttttgtcgccagcatggcaaagggatggtgatcggcactacggggtttgacgaagccggtaaacaagcaattcgtgacgccgctgccgatattgcgattgtctttgctgccaattttagcgttggcgttaacgtcatgcttaagctgctggagaaagcagccaaagtgatgggtgactacaccgatatcgaaattattgaagcacatcatagacataaagttgatgcgccgagtggcaccgcactggcaatgggagaggcgatcgcccacgcccttgataaagatctgaaagattgcgcggtctacagtcgtgaaggccacaccggtgaacgtgtgcctggcaccattggttttgccaccgtgcgtgcaggtgacatcgttggtgaacataccgcgatgtttgccgatattggcgagcgtctggagatcacccataaggcgtccagccgtatgacatttgctaacggcgcggtaagaagcgctttgtggttgagtggtaaggaaagcggtctttttgatatgcgagatgtacttgatctcaataatttgtaaccacaaaatatttgttatggtgcaaaaataacacatttaatttattgattataaagggctttaatttttggcccttttatttttggtgttatgtttttaaattgtctataagtgccaaaaattacatgttttgtcttctgtttttgttgttttaatgtaaattttgaccatttggtccacttttttctgctcgtttttatttcatgcaatcttcttgctgcgcaagcgttttccagaacaggttagatgatctttttgtcgcttaatgcctgtaaaacatgcatgagccacaaaataatataaaaaatcccgccattaagttgacttttagcgcccatatctccagaatgccgccgtttgccagaaattcgtcggtaagcagatttgcattgatttacgtcatcattgtgaattaatatgcaaataaagtgagtgaatattctctggagggtgttttgattaagagtgcgctattggttctggaagacggaacccagtttcacggtcgggccataggggcaacaggtagcgcggttggggaagtcgttttcaatactagtatgaccggttatcaagaaatcctcactgatccttcctattctcgtcaaatcgttactcttacttatccccatattggcaatgtcggcaccaatgacgccgatgaagaatcttctcaggtacatgcacaaggtctggtgattcgcgacctgccgctgattgccagcaacttccgtaataccgaagacctctcttcttacctgaaacgccataacatcgtggcgattgccgatatcgatacccgtaagctgacgcgtttactgcgcgagaaaggcgcacagaatggctgcattatcgcgggcgataacccggatgcggcgctggcgttagaaaaagcccgcgcgttcccaggtctgaatggcatggatctggcaaaagaagtgaccaccgcagaagcctatagctggacacaagggagctggacgttgaccggtggcctgccagaagcgaaaaaagaagacgagctgccgttccacgtcgtggcttatgattttggtgccaagcgcaacatcctgcggatgctggtggatagaggctgtcgcctgaccatcgttccggcgcaaacttctgcggaagatgtgctgaaaatgaatccagacggcatcttcctctccaacggtcctggcgacccggccccgtgcgattacgccattaccgccatccagaaattcctcgaaaccgatattccggtattcggcatctgtctcggtcatcagctgctggcgctggcgagcggtgcgaagactgtcaaaatgaaatttggtcaccacggcggcaaccatccggttaaagatgtggagaaaaacgtggtaatgatcaccgcccagaaccacggttttgcggtggacgaagcaacattacctgcaaacctgcgtgtcacgcataaatccctgttcgacggtacgttacagggcattcatcgcaccgataaaccggcattcagcttccaggggcaccctgaagccagccctggtccacacgacgccgcgccgttgttcgaccactttatcgagttaattgagcagtaccgtaaaaccgctaagtaatcaggagtaaaagagccatgccaaaacgtacagatataaaaagtatcctgattctgggtgcgggcccgattgttatcggtcaggcgtgtgagtttgactactctggcgcgcaagcgtgtaaagccctgcgtgaagagggttaccgcgtcattctggtgaactccaacccggcgaccatcatgaccgacccggaaatggctgatgcaacctacatcgagccgattcactgggaagttgtacgcaagattattgaaaaagagcgcccggacgcggtgctgccaacgatgggcggtcagacggcgctgaactgcgcgctggagctggaacgtcagggcgtgttggaagagttcggtgtcaccatgattggtgccactgccgatgcgattgataaagcagaagaccgccgtcgtttcgacgtagcgatgaagaaaattggtctggaaaccgcgcgttccggtatcgcacacacgatggaagaagcgctggcggttgccgctgacgtgggcttcccgtgcattattcgcccatcctttaccatgggcggtagcggcggcggtatcgcttataaccgtgaagagtttgaagaaatttgcgcccgcggtctggatctctctccgaccaaagagttgctgattgatgagagcctgatcggctggaaagagtacgagatggaagtggtgcgtgataaaaacgacaactgcatcatcgtctgctctatcgaaaacttcgatgcgatgggcatccacaccggtgactccatcactgtcgcgccagcccaaacgctgaccgacaaagaatatcaaatcatgcgtaacgccagcatggcggtgctgcgtgaaatcggcgttgaaaccggtggttccaacgttcagtttgcggtgaacccgaaaaacggtcgtctgattgttatcgaaatgaacccacgcgtgtcccgttctagcgcgctggcgagcaaagcgaccggtttcccgattgctaaagtggcggcgaaactggcggtgggttacaccctcgacgaactgatgaacgacatcactggcggacgtactccggcctccttcgagccgtccatcgactatgtggttactaaaattcctcgcttcaacttcgaaaaattcgccggtgctaacgaccgtctgaccactcagatgaaaagcgttggcgaagtgatggcgattggtcgcacgcagcaggaatccctgcaaaaagcgctgcgcggcctggaagtcggtgcgactggattcgacccgaaagtgagcctggatgacccggaagcgttaaccaaaatccgtcgcgaactgaaagacgcaggcgcagatcgtatctggtacatcgccgatgcgttccgtgcgggcctgtctgtggacggcgtcttcaacctgaccaacattgaccgctggttcctggtacagattgaagagctggtgcgtctggaagagaaagtggcggaagtgggcatcactggcctgaacgctgacttcctgcgccagctgaaacgcaaaggctttgccgatgcgcgcttggcaaaactggcgggcgtacgcgaagcggaaatccgtaagctgcgtgaccagtatgacctgcacccggtttataagcgcgtggatacctgtgcggcagagttcgccaccgacaccgcttacatgtactccacttatgaagaagagtgcgaagcgaatccgtctaccgaccgtgaaaaaatcatggtgcttggcggcggcccgaaccgtatcggtcagggtatcgaattcgactactgttgcgtacacgccagcctggcgctgcgcgaagacggttacgaaaccattatggttaactgtaacccggaaaccgtctccaccgactacgacacttccgaccgcctctacttcgagccggtaactctggaagatgtgctggaaatcgtgcgtatcgagaagccgaaaggcgttatcgtccagtacggcggtcagaccccgctgaaactggcgcgcgcgctggaagctgctggcgtaccggttatcggcaccagcccggatgctatcgaccgtgcagaagaccgtgaacgcttccagcatgcggttgagcgtctgaaactgaaacaaccggcgaacgccaccgttaccgctattgaaatggcggtagagaaggcgaaagagattggctacccgctggtggtacgtccgtcttacgttctcggcggtcgggcgatggaaatcgtctatgacgaagctgacctgcgtcgctacttccagacggcggtcagcgtgtctaacgatgcgccagtgttgctggaccacttcctcgatgacgcggtagaagttgacgtggatgccatctgcgacggcgaaatggtgctgattggcggcatcatggagcatattgagcaggcgggcgtgcactccggtgactccgcatgttctctgccagcctacaccttaagtcaggaaattcaggatgtgatgcgccagcaggtgcagaaactggccttcgaattgcaggtgcgcggcctgatgaacgtgcagtttgcggtgaaaaacaacgaagtctacctgattgaagttaacccgcgtgcggcgcgtaccgttccgttcgtctccaaagccaccggcgtaccgctggcaaaagtggcggcgcgcgtgatggctggcaaaagcctggctgagcagggcgtaaccaaagaagttatcccgccgtactacagcgtgaaagaagtggtgctgccgttcaataaattcccgggcgttgacccgctgttagggccagaaatgcgctctaccggggaagtcatgggcgtgggccgcaccttcgctgaagcgtttgccaaagcgcagctgggcagcaactccaccatgaagaaacacggtcgtgcgctgctttccgtgcgcgaaggcgataaagaacgcgtggtggacctggcggcaaaactgctgaaacagggcttcgagctggatgcgacccacggcacggcgattgtgctgggcgaagcaggtatcaacccgcgtctggtaaacaaggtgcatgaaggccgtccgcacattcaggaccgtatcaagaatggcgaatatacctacatcatcaacaccaccagtggccgtcgtgcgattgaagactcccgcgtgattcgtcgcagtgcgctgcaatataaagtgcattacgacaccaccctgaacggcggctttgccaccgcgatggcgctgaatgccgatgcgactgaaaaagtaattagcgtgcaggaaatgcacgcacagatcaaataatagcgtgtcatggcagatatttttcatccgctaatttgatcgaataactaatacggttctctgatgaggaccgtttttttttgcccattaagtaaatcttttggggaatcgatatttttgatgacataagcaggatttagctcacacttatcgacggtgaagttgcatactatcgatatatccacaattttaatatggccttgtttaattgcttcaaaacgagtcatagccagacttttaatttgtgaaactggagttcgtatgtgtgaaggatatgttgaaaaaccactctacttgttaatcgccgaatggatgatggctgaaaatcggtgggtgatagcaagagagatctctattcatttcgatattgaacacagcaaggcggttaataccctgacttatattctgagcgaagtcacagaaataagctgcgaagttaagatgatccctaataagctggaagggcggggatgccagtgtcagcgactggttaaagtggtcgatatcgatgagcaaatttacgcgcgcctgcgcaataacagtcgggaaaaattagtcggtgtaagaaagacgccgcgtattcctgccgttccgctcacggaacttaaccgcgagcagaagtggcagatgatgttgagtaagagtatgcgtcgttaattttatctcgttgataccgggcgtcctgcttgccagatgcgatgttgtagcatcttatccagcaaccaggtcgcatccggcaagatcaccgtttaggcgtcacatccgtcgtcccctgcaaacgggggcgattttcctccatttgcctcagtggctgcgtttcatgtaagcttacatgacagcgcccgacaagatcctgatactctttggtattcaaccgtttccagtgtaactcgtcgtcactaacattgcgtacagcgcgggctggcgtacccatcaacaactggcgtttctcgccgcgaaagcccgctttgacaaagctcatggcggcaacaatgctctcttcgccaatgaccgcgccatccataatcacgctgttcatcccgaccaatgcatcgcgaccaatcaaacaaccatgcaggatcgctccgtgcccgatatggccgttttccccaacgatagtgtcagtgtcgcagtagccatgcataatgcagccatcctgaatattggctcccgcttgcacgatcaaccgcccgtagtcaccacgcagactggcgagtgggccgatgtagacaccggctcccacaatcacatcgccaatcaagacggcactgggatggacaaacgccgtcgggtgaaccaccggaattaacccctcaaaggcgtaatagctcacggttgttaacgtcctttccacaccggatcgcgcttctcggcaaacgccagcggcccttcaatggcatcttcgctatgcagaacgcttggatagtgtttcaacacgccgctgcgaatatagcgatacgcttcttctaccggcatttcgctggtggtgcggtagatctctttcagcgccgcaatcgccagcggggcgctgttaaccagctgctgagccagttcgcgggcgttatccatcagttccgcctggctaaccacgcggttgactatcccccaacgcagcgcctcttctgcgcccattcgtctgccggtcatcaccatttcattgacgatggcaggcggcaggatcttcggcagacgcagcacaccgccgctgtcaggaacgatgcccagtttggcttccggcagggcgaagctggcgttatcggcacaaacaataaaatctgccgccagcgccagttcaaagccgccgccaaaggcatagccgttcacagctgcgataaccggtttgtcgagattgaaaatttcggttaatcccgcaaaaccacccggaccaaagtcagcatccggtgcttcgccttctgctgccgcttttaaatcccagcccgcggaaaagaacttctctccggcaccggtaataatggcgacacgtaattgcggatcgtcacggaaatttagaaatacttcgcccatttcaaagctggtttttgcatcaatagcattcgcttttggacgatcaagggtaatttccagaatacttccattgcgggtcagatgtaaactttcactcattccttttctccatttttgctttttcagggagctcaacatccctgcaaaaaatgcatattgttttagagtgtgattattagctggcagggtagttccctgctgtttcatttatttcagattctttctaattattttcccgctgcaattacgtggcagatcttttctgatctccagataagagggcactttaaatttcgccatattttgttcgcagaagcggaaaaattcctcttcgctcaatgtttcaccttcattcagcaccacaaatgctttgatggcttcatcgcgaatgctatctttaatacccacaaccacgatgtcctgaattttcgggtgcgcggcgataatattttccagctccacgcaggagacattctcgccgccacgtttaatcatattgcagcggcgatcgacgaaataaaaaaagtcctcttcgtcgcggtatccggtatcgccggtatgcagccagccatcggcttccagcactttcgcagtggcttgtgggttgagaaagtactctttgaagatggttttcccaggtatgcctttaatgcagatttcaccgatctcaccagccgggagcgggcgattgtgatcgtcgcggatctccgcttcgtagcaaaaccccacccgaccaatgctcggccagcgtcgtttatcgccaggacgatcgccgataatgcccacaatggtttccgtcatcccataagacgtcagcaagcgaacgccgaagcgttcacaaaacgcatctttttcctgctcgctcaagttgagataaaacatcacttcccgcaggcggtgttgctgatcgttcgcactaggcggctgtaccatcaacgtacggatcatcatcggaatacattcggtaacggtggcgcggtacttctgtacctgtccccagaaggcgcgggcgctgtatttctcgaccagcacaaaggtggccccggcagaaaacgccgccatcgccgcagtacactggcaatcgatatgaaacgcaggcattaccgtcaggtagacgtcatcgtcacgcagtgcacactgccaggcggagtaatatccagcgaagcgcaggttgtaatgggtaatcaccacacctttcggtcgggaggtggtgccggaggtgaagagaatttccgccgtatcgtcagtgcttagcggcggtgcatagcacaaggtggcaggttgttgatttttcagttgagtaaagctactcacgccatcatcagcgggaagtgccacatctgtcaggcaaatgtgccgcaattgagtggcatcttcctgctgaatctgttgatacataggatagaattgcgcactggtcaccagcaggcacgcctggctattttgcaggatccacgcgctttcctcgcacaacaggcgggcgttaatcggcaccataatcgcgccaatttttgccagcccgaaccagcaaaagataaattccgggcagttgtcgagatgtagtgcaaccttgtcgcctttgcgaatccccagcgtataaaacaggtttgccgtgcggttaatctcctgatttaactcaagataactataccggttaacgactccgccgctggattcacaaatcagcgccgttttatgaccgtaaacgtccgcaagatcgtcccacatttgacgtagatgttgtccgccaatgatatccattgcacctctatccatttttgttcgtttgttattgggcgggcgctagtcaggcaagccgactgacgccacgcgtttagtcctcaactttggccagacctttgctgaccaactcctgaatgtcgttttcgctgtagccgatatttttcaaaatggcagccgtgtccataccatgactgggcattccgcgccagatttgtccggggttatttttgaatttcggcatgatgttcggccctttgcaggtgcgaccatccatcgtttgccactgagtgatactttcgcgagccacatactgtggattgctttccagttccggtacggtcagcactttggcgcaggcgatattcagttcagcaaagcgttcttttacttccgcgatggtatgtgtcgccagccaggcatcgagtttctcttcaaccagtgggccgtaagggcattcgatacggtggataagctgagtgccttccgggatttctggcgtgccaagcagatgtgcgaggccaatatctttaaagcactcttcaatttgggtaatgcccaccagttccatcacgatgtagccgtcggcacatttatacagaccgcaaccggcgtagtagggatctttacctttgctcatgcgcgggcacatttcgccgccgttgaagtaatccatcatgaagtactggcccatacgcagcatcacttcatacatggcgatgtcgatactttcgcctttaccggtttcacgcactttatgcagtgctgccagcgccgccgtggtggcggtcaggccagaaaagtaatcggcggtatacgggaaggcaggcattggctggtcaacatcaccgttctgaatcaggtaaccactaaaggcctgggcgatagtgttataggccggaagattggtgtactcctcggtgccgtactgaccaaaaccggacaggtgagcgataaccagtttcgggttgtgctgccacagtacttcatcggtaatgccacgacgggcaaaggccggacctttactggcttcgatgaagatatcggtggtttccattaatttcagaaacgcttcgcggccttcatctttgaaaatatttaagctcagcgcgtgcaaattgcggcgggagagttgcgggtagttcggttgaacgcgaatggtgtcggcccaggcgacgttctcgatccagataacttccgcgccccattctgcgaacatttgcccggcaaacggtccggcgatttcgataccggagaagacaacgcgcaatccggccaacggcccgaatttcggcatgggtagatgatccattatttgctcctgaaaaatttatgtagcgcatgactgccggatgcggcgtaaacgctttatccggcctacattcgtgctcccgtaggcctgataagacgcatcagcgtcgcatcaggcagcgcacggacttagcggtattgcttcagcaccgcacgacccagcgtcaggatctgcatttcgtcagatcccccggagacgcggtctacacgcagatcacgccagaagcggctgatgcggtggttgcccgcaatcccgacaccgcccagcacctgcattgcgctatccacaacttcaaatgccgcattggcgcagaagtatttgcacatcgctgcatcgccagaggtgatggtgccgttgtctgctttccacgctgcttcatacagcatgtttttcatggagtttaatttgatcgccatgtgggcgaatttttcctgaatcaactggaaacgaccaatagcctcgccaaactgcacgcgctgattggcgtagcgcgccgcatcttcaaaggcgcacatcgccgtaccgtagttggtgagggctaccaggaaacgttcatggtcgaactcttctttgacgcggttaaagccgttaccttcccgaccgaacatgtctttctcgtccagttccacgtcgtcaaaggtgatttcacagcagctatccatacgcagaccgagcttttcaagtttggtcactttgatgcccggtttgctcatatcaacaaaccattcggtgtagacaggtttgtccggagaagccccgtcgcgcgccatcaccacgatgtacggggtgtaggcgctgctggtaataaaacacttactaccattaagataaatcttaccatttctacgggtataagtcgttttcaggctacccacgtcggagcccgcgcccggttcggtaatcgcactgttccacatctgcttaccggtgccgcggaaagccataattttgtcgatctgctcttgtgtgccttcgcgcaggaaggtgttgaacccgcccggcaactggtacagcacataggttggtgcccccagacgtcccagctccatccacacggcggcgagagtaacaaaccccgcgtccagaccaccgtgctcttcagggatcagcagactgtcgatacccatatccgccagtgctttgacaaaacgttccgggtagacgctgtcacggtcgcactcggcaaaataggcctcccagttttcgctggccatcagttcgcggataccggcgacaaacagttcctgctcatcatttaaattaaaatccatctttcaacctcttgatattttgggggttaattaatctttccagttctgtttcgcgtctttaataaaggagagcgtcaccataatgttgacgaagaacagcgggcatcctccggcgataatggcggtttgaatcggtttcaggccgccgagcgccagcagaacaataccgataatgccaaccagaatactccaaccgatacgcaccagcagaggtggttcttcaccatcgcgtacttcgcggcaagtggacatcgccagggtataagagcaggcgttaaccagcgtaacggtggcaataaagcagaggatgaagaagccccacatggtggcggtgctgagtggcagagcggcccaggtttcaatgatggcgcgcgccacaccgtactgttcgatcagatttggaatgttgatgatgtttttatctatcaacagcagagtgttactaccgagtacagtccacaggatccaggtactcgctgtcagccccagcaccatgccgaagcacagttcacgcacagtacgaccacgggagatgcgggcgaggaagatactcatctggatagcataaatcacccaccatgcccagtagaacacggtccagccctgcgggaagccgcctttagcgatgggatcggtatagaacaacatgcgcggcagatacatcagcaacatccccacgctatcggtgaagtagttcatgatgaagctggcaccgctgacaatgaacacccaacccagcatcaggaagctcaggtaactacgcacgtcactggcgatacgtacccctttttgcagaccgcaagcgacgcaaatggcgttgaggataatccagcaggtaatgatgatagcgtccagttgcagggtatgcggaatgccaaacaaccattgcatacactcggtcaccagcggcgtggcaaggcccagactggtacccatcgcgaagatcaaggcgacgagatagaagttgtcgacgatagtgccgaacaaccctttggcgtgtttttcacctaccagcggcaccagtgtgctgctggggcgaatcacttccattttgcggacaaagaagaagtaagcgaaggcgacactaaggaagctgtaagtggcccacggcagaggtccccagtggaacaagctgtaagccagccccaactctttcgcccctgtgctgttcggttctaagccaaacggcggggtggagatgtagtagtagatctcaatgcttccccagaacagtacggcagcagacgtacaggaggcgaacatcataaagatccaactggcggtgctaaattctggcggttcgttacctaaacgctttttggcatacgggccaaacaccagccagaaccaaccgaaaagcatcaccaccatataccattcaaatgcccatccccatacattggtgacgtaactgaatacagcattaataacgacattcgctgcatccagatctctgactgtaagccaacaaagtatgccgacgattattaacggcggaaagaaaaccttcggttctattcccgtttttctcttttcattcttcatgagttaattccactgtgaaaacgaatatttattttgcgttcccgtttgttttatttttgttaacatttaatataattattattaacctcgtggacgcgttaatggctaactcataatgggtattcaataagctgtattctgtgattggtatcacatttttgtttcgggtgaatagagggcgttttttcgttaattttgattaataatcagtttgttatgctctgttgtgagtaaaaaataacatctgactttcaatattggtgatccataaaacaatattgaaaatttctttttgctacgccgtgttttcaatattggtgaggaacttaacaatattgaaagttggatttatctgcgtgtgacattttcaatattggtgattaaagttttatttcaaaattaaagggcgtgatatctgtaattaacaccaccgatatgaacgacgtttccttcatgatttctggagatgcaatgaagattattacttgctataagtgcgtgcctgatgaacaggatattgcggtcaataatgctgatggtagtttagacttcagcaaagccgatgccaaaataagccaatacgatctcaacgctattgaagcggcttgccagctaaagcaacaggcagcagaggcgcaggtgacagccttaagtgtgggcggtaaagccctgaccaacgccaaagggcgtaaagatgtgctaagccgcggcccggatgaactgattgtggtgattgatgaccagttcgagcaggcactgccgcaacaaacggcgagcgcactggctgcagccgcccagaaagcaggctttgatctgatcctctgtggcgatggttcttccgacctttatgcccagcaggttggtctgctggtgggcgaaatcctcaatattccggcagttaacggcgtcagcaaaattatctccctgacggcagataccctcaccgttgagcgcgaactggaagatgaaaccgaaaccttaagcattccgctgcctgcggttgttgctgtttccactgatatcaactccccacaaattcctagcatgaaagccattctcggcgcggcgaaaaagcccgtccaggtatggagcgcggcggatattggttttaacgcagaggcagcctggagtgaacaacaggttgccgcgccgaaacagcgcgaacgtcagcgcatcgtgattgaaggcgacggcgaagaacagatcgccgcatttgctgaaaatcttcgcaaagtcatttaattacaggggatgctatgaacacgttttctcaagtctgggtattcagcgataccccttctcgtctgccggaactgatgaacggtgcgcaggctttagctaatcaaatcaacacctttgtcctcaatgatgccgacggcgcacaggcaatccagctcggcgctaatcatgtctggaaattaaacggcaaaccggacgatcggatgatcgaagattacgccggtgtcatggctgacactattcgccagcacggcgcagacggcctggtgctgctgccaaacacccgtcgcggcaaattactggcggcaaaactgggttatcgccttaaagcggcggtgtctaacgatgccagcaccgtcagcgtacaggacggtaaagcgacagtgaaacacatggtttacggtggtctggcgattggcgaagaacgcattgccacgccgtatgcggtactgaccatcagcagcggcacgttcgatgcggctcagccagacgcgagtcgcactggcgaaacgcacaccgtggagtggcaggctccggctgtggcgattacccgcacggcaacccaggcgcgccagagcaacagcgtcgatctcgacaaagcccgtctggtggtcagcgtcggtcgcggtattggcagcaaagagaacattgcgctggcagaacagctttgcaaggcgataggtgcggagttggcctgttctcgtccggtggcggaaaacgaaaaatggatggagcacgaacgctatgtcggtatctccaacctgatgctgaaacctgaactgtacctggcggtggggatctccgggcagatccagcacatggttggcgctaacgcgagccaaaccattttcgccatcaataaagataaaaatgcgccgatcttccagtacgcggattacggcattgttggcgacgccgtgaagatccttccggcgctgaccgcagctttagcgcgttgatccactctggcagggctgcattttggccctgccgctgacagggagctcttatgtccgaagatatctttgacgccatcatcgtcggtgcagggcttgccggtagcgttgccgcactggtgctcgcccgcgaaggtgcgcaagtgttagttatcgagcgtggcaattccgcaggtgccaagaacgtcaccggcgggcgtctctatgcccacagtctggaacacattattcctggtttcgccgactccgcccccgtagaacgcctgatcacccatgaaaaactcgcgtttatgacggaaaagagtgcgatgactatggactactgcaatggtgacgaaaccagcccatcccagcgttcttactccgttttgcgcagtaaatttgatgcctggctgatggagcaggccgaagaagcgggcgcgcagttaattaccgggatccgcgtcgataacctcgtacagcgcgatggcaaagtcgtcggtgtagaagccgatggcgatgtgattgaagcgaaaacggtgatccttgctgatggggtgaactccatccttgccgaaaaattggggatggcaaaacgcgtcaaaccgacggatgtggcggttggcgtgaaggaactgatcgagttaccgaagagcgttattgaagaccgttttcagttgcagggtaatcagggggcggcttgcctgtttgcgggaagtcccaccgatggcctgatgggcggcggcttcctttataccaatgaaaacaccctgagcctggggctggtttgtggtttgcatcatctgcatgacgcgaaaaaaagcgtgccgcaaatgctggaagatttcaaacagcatccggccgttgcaccgctgatcgcgggcggcaagctggtggaatattccgctcacgtagtgccggaagcaggcatcaacatgctgccggagttggttggtgacggcgtattgattgccggtgatgccgccggaatgtgtatgaacctcggttttaccattcgcggtatggatctggcgattgccgccggggaagccgcagcaaaaaccgtgcttagtgcgatgaaaagcgacgatttcagtaagcaaaaactggcggaatatcgtcagcatcttgagagtggtccgctgcgcgatatgcgtatgtaccagaaactaccggcgttccttgataacccacgcatgtttagcggctacccggagctggcggtgggtgtggcgcgtgacctgttcaccattgatggcagcgcgccggaactgatgcgcaagaaaatcctccgccacggcaagaaagtgggcttcatcaatctaatcaaggatggcatgaaaggagtgaccgttttatgacttctcccgtcaatgtggacgtcaaactgggcgtcaataaattcaatgtcgatgaagagcatccgcacattgttgtgaaggccgatgctgataaacaggcgctggagctgctggtgaaagcgtgccccgcaggtctgtacaagaagcaggatgacggcagtgtgcgcttcgattacgccggatgtctggagtgcggcacctgtcgcattctggggctggggagcgcgctggaacagtgggaatacccgcgcggcacctttggtgtggagttccgttacggctgatgttggtttgatacgtaacgccgcactgactctcattgcaaaaaacaggaataaccatgcaaccgtccagaaactttgacgatctcaaattctcctctattcaccgccgcattttgctgtggggaagcggtggtccgtttctggatggttatgtactggtaatgattggcgtggcgctggagcaactgacgccggcgctgaaactggacgctgactggattggcttgctgggcgcgggaacgctcgccgggctgttcgttggcacaagcctgtttggttatatttccgataaagtcggacggcgcaaaatgttcctcattgatatcatcgccatcggcgtgataagcgtggcgacgatgtttgttagttcccccgtcgaactgttggtgatgcgggtacttatcggcattgtcatcggtgcagattatcccatcgccaccagtatgatcaccgagttctccagtacccgtcagcgggcgttttccatcagctttattgccgcgatgtggtatgtcggcgcgacctgtgccgatctggtcggctactggctttatgatgtggaaggcggctggcgctggatgctgggtagcgcggcgatcccctgtttgttgattttgattggtcgattcgaactgcctgaatctccccgctggttattacgcaaagggcgagtaaaagagtgcgaagagatgatgatcaaactgtttggcgaaccggtggctttcgatgaagagcagccgcagcaaacccgttttcgcgatctgtttaatcgccgccattttccttttgttctgtttgttgccgccatctggacctgccaggtgatcccaatgttcgccatttacacctttggcccgcaaatcgttggtttgttgggattgggggttggcaaaaacgcggcactagggaatgtggtgattagcctgttctttatgctcggctgtattccgccgatgctgtggttaaacactgccggacggcgtccattgttgattggcagctttgccatgatgacgctggcgctggcggttttggggctaatcccggatatggggatctggctggtagtgatggcctttgcggtgtatgcctttttctctggcgggccgggtaatttgcagtggctctatcctaatgaactcttcccgacagatatccgcgcctctgccgtgggcgtgattatgtccttaagtcgtattggcaccattgttagcacctgggcactaccgatctttatcaataattacggtatcagtaacacgatgctaatgggggcgggtatcagcctgtttggcttgttgatttccgtagcgtttgccccggagactcgagggatgagtctggcgcagaccagcaatatgacgatccgcgggcagagaatggggtaaattgttcagatttctctcttttctgaatcaatattattgactataagccgcgtgaatatatgactacactttgtgggaaaacaaaggcgtaatcacgcgggctacctatgattcttataatttatgcgcatccgtatccgcatcattcccatgcgaataaacggatgcttgaacaggcaaggacgctggaaggcgtcgaaattcgctctctttatcaactctatcctgacttcaatatcgatattgccgccgagcaggaggcgctgtctcgcgccgatctgatcgtctggcagcatccgatgcagtggtacagcattcctccgctcctcaaactttggatcgataaagttttctcccacggctgggcttacggtcatggcggcacggcgctgcatggcaaacatttgctgtgggcggtgacgaccggcggcggggaaagccattttgaaattggtgcgcatccgggctttgatgtgctgagccagccgctacaggcgacggcaatctactgcgggctgaactggctgccaccgtttgccatgcactgcacctttatttgtgacgacgaaaccctcgaagggcaggcgcgtcactataagcaacgtctgctggaatggcaggaggcccatcatggataattaaggaatggcaggaggcccatcatggatagccatacgctgattcaggcgctgatttatctcggtagcgcagcgctgattgtacccattgcggtacgtcttggtctgggaagcgtacttggctacctgatcgccggctgcattattggcccgtgggggctgcgactggtgaccgatgccgaatctattctgcactttgccgagattggggtggtgctgatgctgtttattatcggcctcgaactcgatccacaaaggctgtggaagctgcgtgcggcagtgttcggctgtggcgcattgcagatggtgatttgcggcggcctgctggggctgttctgcatgttacttgggctgcgctggcaggtcgcggaattgatcggcatgacgctggcgctctcctctacggcgattgccatgcaggcgatgaatgaacgcaatctgatggtgacgcaaatgggtcgcagtgcctttgcggtgctgctgttccaggatatcgcggcgatcccgctggtggcgatgattccgctactggcaacgagcagtgccagcacgacgatgggcgcatttgctctcagcgcgttaaaagtggcgggtgcgctggtgctggtggtattgctggggcgctatgtcacgcgtccggcgctgcgttttgtagcccgctctggcttgcgggaagtgtttagtgccgtggcgttattcctcgtgtttggctttggtttgctgctggaagaggtcggcttgagcatggcgatgggcgcgtttctggcgggcgtactgctggcaagcagcgaataccgtcatgcgctggagagcgatatcgaaccatttaaaggtttgctgttggggctgtttttcatcggtgttggcatgagcatagactttggcacgctgcttgaaaacccattgcgcattgtcattttgctgctcggtttcctcatcatcaaaatcgccatgctgtggctgattgcccgaccgttgcaagtgccaaataaacagcgtcgttggtttgcggtgttgttagggcagggcagtgagtttgcctttgtggtatttggcgcggcgcagatggcgaatgtgctggagccggagtgggcgaaaagcctgaccctggcggtggcgctgagcatggcagcaacgccgattctgctggtgatcctcaatcgccttgagcaatcttctactgaggaagcgcgtgaagccgatgagatcgacgaagaacagccgcgcgtgattatcgccggattcggtcgttttgggcagattaccggacgtttactgctctccagcggggtgaaaatggtggtactcgatcacgatccggaccatatcgaaaccttgcgtaaatttggtatgaaagtgttttatggcgatgccacgcggatggatttactggaatctgccggagcggcgaaagcggaagtgctgattaacgccatcgacgatccgcaaaccaacctgcaactgacagagatggtgaaagaacatttcccgcatttgcagattattgcccgcgcccgcgatgtcgaccactacattcgtttgcgtcaggcaggcgttgaaaagccggagcgtgaaaccttcgaaggtgcgctgaaaaccgggcgtctggcactggaaagtttaggtctggggccgtatgaagcgcgagaacgtgccgatgtgttccgccgctttaatattcagatggtggaagagatggcaatggttgagaacgacaccaaagcccgcgcggcggtctataaacgcaccagcgcgatgttaagtgagatcattaccgaggaccgcgaacatctgagtttaattcaacgacatggctggcagggaaccgaagaaggtaaacataccggcaacatggcggatgaaccggaaacgaaacccagttcctaataaagagtgacgtaaatcacactttacagctaactgtttgtttttgtttcattgtaatgcggcgagtccagggagagagcgtggactcgccagcagaatataaaattttcctcaacatcatcctcgcaccagtcgacgacggtttacgctttacgtatagtggcgacaattttttttatcgggaaatctcaatgatcagtctgattgcggcgttagcggtagatcgcgttatcggcatggaaaacgccatgccgtggaacctgcctgccgatctcgcctggtttaaacgcaacaccttaaataaacccgtgattatgggccgccatacctgggaaagtatcggtcgtccgttgccaggacgcaaaaatattatcctcagcagtcaaccgggtacggacgatcgcgtaacgtgggtgaagagcgtggatgaagccatcgcggcgtgtggtgacgtaccagaaatcatggtgattggcggcggtcgcgtttatgaacagttcttgccaaaagcgcaaaaactgtatctgacgcatatcgacgcagaagtggaaggcgacacccatttcccggattacgagccggatgactgggaaagcgtattcagcgaattccacgatgctgatgcgcagaactctcacagctattgctttgagattctggagcggcggtaattttgtatagaatttacggctagcgccggatgcgacgccggtcgcgtcttatccggccttcctatatcaggctgtgtttaagacgccgccgcttcgcccaaatccttatgccggttgctcggctggacaaaatactgtttatcttcccagcgcaggcaggttaatgtaccaccccagcagcagccggtatccagcgcgtatataccttccggcgtacctttgccctccaggcttgcccagtgaccaaaggcgatgctgtattcttcagcgacagggccaggaatcgcaaaccacggtttcagtggggcaggggcctcttccgggctttctttgctgtacatatccagttgaccgttcgggaagcaaaaacgcatacgggtaaaagcgttggtgataaaacgcagtcttcccagcccccgcaattccggactccagttatttggcatatcgccgtacatggcatcaagaaagaagggataggagtcactgcttagcaccgcttctacatcgcgtgcgcactctttggcggtctgcagatcccactgcggcgtgatccctgcgtgggccatcaccagctttttctcttcgtcgatttgcagcagaggctggcgccgcagccagttaagcagctcgtcggcatccggcgcttccagcagcggtgtcaggcgatctttcggtttattgcggctgatcccggcaaataccgccagcagatgcagatcgtgattgcccagcaccagacgtacgctgtcgcctaaggatttcacatagcgcagaacatccaggctacccggcccgcgcgcgaccagatcgcccgtcagccagagggtatctttcccaggggtaaattctactttatgcagcaatgcgatcagttcatcgtaacaaccatgaacgtcgccaataaggtatgtcgccatattcttttaatgaatgagtgtgggaacggcgagtcggaatacgggaatgtcgatgctgaaagggacgccattttcatcgatcatttcgtagtgaccctgcatggtgcccagcggggtttcaatgattgcaccgctggtgtactggtactcttcgccaggcgcgataagtggctggacgccaaccactccttcgccctggacttcggtttcacggccattgccattggtgatcagccagtaacgccccaacaactgcactggcgctcgccccagattgcgtatggttacggtataagcaaaaacgtaacgttcattatcaggactagattgagcctcaatgtagacgctttgaacctgaatacacactcgggggctattgatcatcgttaactctcctgcaaaggcgcgttctccgccagatagttcgccatctggcaatattgcgcgacagagatattttccgctcgcatcgccgggtcgatccccattcccgttaacacctcgacgctaaacaggttgccgaggctgttacgaatggttttacgacgctggttaaaggcttcggtggtgatgcggctcaacacacgaacatctttaaccgggtgaggcatcgttgcatgaggaaccaggcgcacgacggcggaatccactttgggtggtggtgtaaaggcactcggcggtacttccagtaccgggatcacattgcaatagtattgcgccatgacgcttaatcgaccatacgctttgctgttcggtcctgcaaccagacgattcaccacctctttttgcaacataaagtgcatgtcggcaatggcatcagtatagctaaacagatggaacatcaacggcgtggagatgttataaggcaggttgccgaaaacacgcagcggctgacccattttctcggccagttcaccaaagttaaaggtcatcgcatcctgctgataaatcgtcagtttcgggcctaagaatggatgcgtttgcagacgtgccgccagatcgcggtcaagttcgatgaccgtcagctggtccagacgttcgccgaccggttcggtcaatgccgccagaccggggccgatttcgaccatcgcctggcccttttgcgggttaatggcagacacaatactgtcgatcacgaactgatcgttgagaaagttttgcccgaagcgtttacgggctaagtggccctggtggactcgattattcattgggtgttaacaatcattttgatggcgagattaagcgccgtaataaaactgccggcatcggctttgccacgtcccgccagttcaagcgcggtgccgtggtccacacttgtgcgaataaagggcaggcccagcgtaatgttcacaccgcgcccgaagccctggtattttagcacgggaagaccctgatcgtggtacatcgccagcacggcgtcggcgttatcaagatatttcggctgaaacagggtatcggcaggcagcggcccgttgagtttcatcccctgcgcccgcagctcattgagcaccggaataatggtgtctatctcttccgtacccatatgaccgccttcgcccgcgtgcggattcagcccgcagaccagaatgcgcggttcggcaataccaaatttggtccgcaaatcgtgatgcaaaatagcaatcacttcgtgcaaaagtgcaggggtgatagcgtctgcgatatcgcgcagcggtaaatgcgtcgttgccagcgccacgcgaagttcttcggtcgccagcatcatcaccacctttttcgcctggctacgctcttcgaaaaactcggtatgaccggtaaaaggaatgccagcgtcgttaataacgcctttatgcaccggacctgtgatcagcgcggcaaattcgccgttcagacaaccatcgcacgctcgcgccagcgtttccaccacataatgcccattttcaaccgctaactgccccgcagtgacaggtgcacgtagcgcgacaggaagtagcgttaatgtgcccgcagtttgcggttgtgcaggggagttgggggaataagggcggagggtgagcggcaaaccgagcatcgctgcccggttggtaaggagagtggcatcggcacaaacaaccagttcgaccggccactcacgctgtgcaagctggacaactaagtccgggccaatcccggcgggctcgccgggagtgatcacaacacgttgggttttaaccattagttgctcaggattttaacgtaggcgctggcacgttgttcctgcatccagcttgctgcttcttcgctgaacttacggttcatcagcatgcggtatgcacgatctttctgcgcagcgtcggttttatcgacattacgggtatccagcagttcgattaaatgccagccgaaactagagtgaaccggtgcactcatttgacctttgttcaggcgagtcagggcgtcacggaaggccggatcgaaaatatctggtgtagcccagccgagatcgccgccctggttagcagagcctggatcctgagagaactctttcgctgcggcagcaaaagtcgttttaccactcttgatatcagcagcaatctgttccagtttcacacgggcctgttcgtcagtcatgatcgggctcggtttcagcagaatatggcgagcatgaacttcggtcacgctgatatttttgctttcgccgcgcaggtcgttaactttcagaatatggaagccaacgccggaacgaatcgggccaacaatgtcgcctttcttcgcggtgcttaatgcctgggcgaagatcccgggcaactcctgaatacggccccagcccatctggccgccgttcagcgcctgctggtcggcagaatgagcaatcgccagcttaccgaaatcagcgccgttacgcgcctgatcgacaatggcgcgcgcctggctttccgcttcgttcacctgatcagaggtcgggttttccggcagcgggatcaggatgtggctcaggttcagctcagtgctggcgtcgttttggttacccacctgctgcgccagggattcgacttcctgcggcaggatggtgatgcgacgacgcacctcgttgttacgcacttcagagataatcatctctttgcggatctggttacgataggtgttgtagttcagtccatcgtaagccagacggctgcgcatctgatccagcgtcatgttgttctgtttcgcgatgttagcaatcgcctgatccagctgctcatcggagattttcactcccattttctgccccatctgcaggatgatttgatccatgatcaaacgttccatgatttggtggcgcagcgtcgcgtcatcaggaagttgctgccttgcctgagcagcgttcagttttacgctctgcattaatccatcaacgtcgctttccagcacgacgccgttattgacgacggctgcgactttatcgactacctggggggcagcgaaactggtattcgcgatcatggcgataccgagaagcagcgttttccagttcttcatactttttccatttcaattaaccgcactgcggattacgtggtaaatcaacaaatcacaaagtgttttgatacggcagaatgttgctacgcagcatctcttgcgtacccagaccgtagttggagctcaggccgcgaagttcgatgttaaagccgattgcgttgtcatataccgcatgttgtttatcgttatcccaaccgttcagcttccgctcgtaaccgacgcgaattgcatagcagcaggagctgtattgcacacctaacatagagtcggcttgcttgttagcattggtgtcgtagtagtaggccccaacaatggaccaacgatcggcaattggccagctggcgacagcacctacctggctaataccattcttatattgctcagcagtggaatagtacttaggcagcgtagcctgaatatattccgggctggcgtaacggtaattcagctgtaccagacggtcttcatcccgacggtattcaatgctggagttactggtcgctacgttatccagacgtgtatcgtactgaatcccgccacgcaatccccaacgctcggagatacgccagtaagtatcgcctgcccacaccagactacccgttttgtcgtcattctcccatgttatgttgtcatcgccagtgcgagactccgtgaaatagtagatttgaccaacggaaatattaaaacgttcaacggcagcatcatcatatatgcgagatgtgacaccggtcgtcacctggttagcggaggcaatacggtcaagaccgccgtaagtccggtcccggaacaggccagagtagtcagattgcagcagagagctgtcgtagttatagatgtcgctctgatcgcgatacggcacgtacaaatactgcgcgcgcggttccagcgtttgggtataacccggagccagcatttccatatcgcgttcaaagaccattttgccgtcaactttgaattgcggcattacgcggttaacggattcgtccagcttggtcgtgtttctggagttataccagtcaagattggtttgctgataatgggttgccagcaacttcgcttcggtattgatgctgccccagttattagagagcggcaaattgatggtcggttccaggtgaacacgggttgcttcaggcatgtcgtctctggtgttaacaaagtgcactgcctggccgtaaatacgcgtatcaaacggaccaacatcattctggtagtaattaacgtctaactgcggctctgcgctgtagctactggtgttctgttcgctgaaaacctggaactgcttggtactaacggtggcattgaagttttgcaccgcatagccaacgctgaatttttgcgttgcgtagccgtcagtactggaaccgtacttgttatcgaaatcattgaagtagctaggatcgctgaccttggtgtagtcgacgttgaaacgccacacctgatccatgaccccggagtggttccagtagaataaccaacgacgactactgtcatcgttcgggtgttcatcttcatagactttatcactaggcagatagtccagttccatcaagccagcgcccgcctgggagaggtagcggaattcgttctcccacatgatgttgccacgacgatgcatataatgcggcgtgatggtggcatccatatttggcgcgatgttccagtaatatggcaggtagaactcaaagtagttggtggtggtgtacttggcgttcgggatcaagaaaccagagcgacgtttgtcacccaccggcaactgcaaataggggctataaaagatcggtaccggacccaccttaaagcgggcgttccagatctccgcaacttgttcttcgcggtcatgaataatttcgctacctaccacgctccaggtgtcagaacccggcagacaggaggtaaagctaccgttatccagaatggtatagcggttttcgccacgttgtttcatcaggtccgctttaccgcgaccctggcgacccaccatctggtaatcaccttcccagacgttggtatctttggtgttcagattcgcccagcctttcggccctttgaggatcacctggttatcgtcgtaatggacattaccgagcgcatcaacggtacgtaccggctccggttgtcctggtgcctctttttgatggagctgcacttcgtcggcctgcagacggctgttaccctgcatgatatccacgctgccagtaaacacggcgtcatccgggtagtcccctttcgcgtggtcagcattgatagtcacgggtaagtcattggtatcgccctgtaccagaggacggtcatagcttggcacgcccaacatgcactgactggcgaggtcggctgccagtccctgttgactataaagggcggtggcaatcatggtggccaggagagtggggatacgttttttcatacgttgattttattgttccatcatcggtaacgttgcgcgtgacaaacggtcagagactaacgtactcgtcatctctacgctagtgttaatcctgtccgaatagcgtcagtggtgttaggcacggcattgaatgacaggtatgataatgcaaattataggcgatgtcccacaattgaccgcagccggaaaacggtaaaagcacctttatattgtgggagatagccctgatatccgtgtgtcgatttggggaatatatgcagtattggggaaaaatcattggcgtggccgtggccttactgatgggcggcggcttttggggcgtagtgttaggcctgttaattggccatatgtttgataaagcccgtagccgtaaaatggcgtggttcgccaaccagcgtgagcgtcaggcgctgttttttgccaccacttttgaagtgatggggcatttaaccaaatccaaaggtcgcgtcacggaggctgatattcatatcgccagccagttgatggaccgaatgaatcttcatggcgcttcccgtactgcggcgcaaaatgcgttccgggtgggaaaaagtgacaattacccgctgcgcgaaaagatgcgccagtttcgcagtgtctgctttggtcgttttgacttaattcgtatgtttctggagatccagattcaggcggcgtttgctgatggtagtctgcacccgaatgaacgggcggtgctgtatgtcattgcagaagaattagggatctcccgcgctcagtttgaccagtttttgcgcatgatgcagggcggtgcacagtttggcggcggttatcagcagcaaactggcggtggtaactggcagcaagcgcagcgtggcccaacgctggaagatgcctgtaatgtgctgggcgtgaagccgacggatgatgcgaccaccatcaaacgtgcctaccgtaagctgatgagtgaacaccatcccgataagctggtggcgaaaggtttgccgcctgagatgatggagatggcgaagcagaaagcgcaggaaattcagcaggcatatgagctgataaagcagcagaaagggtttaaatgaccctgtaaatgatgctgagtaactgcccacgattaaaggtggccgccctggcggtcacttctttgagaaaaggcgtttactcagaatggtggacaggctcaatgcacgatttacgggaggggttctgtaggttttatcgcgttgaccctgcttaaggttgagagctttacgacgagcggaattatatttttacgtcttaaaaataaaaaacacatacctgaatgagcgatttttgaaagtatatttattcagaacgcgcatcatgagtttttaactcaatgcgaggctattaccatgaaagtaagtgttccaggcatgccggttacacttttaaatatgagcaagaacgatatttataagatggtgagcggggacaagatggacgtgaagatgaatatctttcaacgcttgtgggagacgttacgccatctgttctggagtgataaacagactgaggcttataaacttctgttcaatttcgtgaataaccagactggcaacatcaacgccagtgaatactttactggggctatcaacgagaatgagagagaaaagtttatcaatagcctggaattattcaataaacttaaaacatgcgcaaaaaatccggatgagttggtcgcaaagggcaatatgcgctgggtcgcccagaccttcggggatatcgagttaagtgtcacttttttcattgaaaagaataagatatgtactcagacgttgcagctgcataagggccaaggtaacttgggcgttgatcttagaaaggcttaccttcccggcgttgacatgagggattgttaccttggtaaaaaaacaatgaaaggtagcaatgatatcctttatgagagacctgggtggaatgctaacctgggcgtgctaccccggacggtgctaccccggacggtgctaacccggacggtgctaacctggacggtgctaccgtgaacggtgctacctccttatatgatgaggtaattattattaataaaatcccccccaaaaaaattgatactaaaggagttgctactgaagaagttgctactaaaaaagtactgctgaacaaattactgacaacgcaattattgaatgagccagaataagctaaggttgaaggggctggaacgccccttcaaccttagcagtagcgtgggatgatttcacaattagaaagacctgcatgatgagctagagaagaggctagtgacgcaaggcgtcgtgcaggacacggatcaccgagatgggcatcgccaaccagactgctaattagcccatgaataacaatcagaaaggaccataacagacccgttaaaatgaaatataagagacggtcaacgggtgaagaaaaagttcaaaaattcgctgtggagcaggaagggaattaccgaatggaaagcgtagccacacgcaacaactgaaagcagtttggcagaaacaaaaaatccccggactcggggatttatgtacaagaggcagcccttaggatgagggtataaacgtacaggaaaggttaaaaatccgctggcgctttaaacgtcatactattgccatacgccggatgggtaatcgtcaacatctctgcatgtagcaacaaacgtggtgccatcgctctcgcttctggacttgcataaaaacgatcgccgagaatcggatgacccagcgccagcatatgcacacgcaattgatggctacgcccggtaatcggttttaacaccactcttgccgtgttatccgccgcatactccaccacttcatattccgtctgcgcaggtttacccgtttcgtaacagactttctgtttcgggcggtttggccagtcgcaaatcagcggcagatccaccagaccttctgcgggggatggatgcccccagacgcgggccacatactgctttttcggctcgcgctcgcggaactggcgttttaactcccgctccgcggctttggtcagcgccactacaatcacgccgctggtagccatatccagacgatgcacgctttctgcctgcggataatcacgctgaatgcgcgtcatcacgctgtctttgtgctcttccagacgacccggcacactcaacaaaccgctcggcttgttgaccaccataatatggtcatcctgatacaggataaccaaccagggttcctgcggtggattgtagttttccatccccattttcggctccgttactgatgcgttacaacgatcaaacgcagggcatccagacgccaacctgcctgatccaggctttccattacctgctgacggttgctctcaatggcggtcagttcgtcgtcacgaatgttcgggttcactgcacgcagagcttccagacgagacagctcggcagacagtttttcgtcggcttcgttacgcgctgcatcaatcaatgcacgggcagatttctcgatctgcgcttcacccagttgaaggatagcgtgaacatcctgctgcacggcgttaaccagtttgctgccggtgtgacggttaaccgcgttaagctggcggttaaaggtttcaaactctacctgcgccgccaggttgttgccgtttttatccagcagcatacgtaccggcgtcggtggcaggaagcggttgagctgcaactgcttcggagcctgggcttcaaccacataaatcagttccaccaacagcgtacctaccggcaacgctttgttttttaacagactaatcgtgctgctaccggtatcgccagaaaggatcagatccagaccgttgcggatcagcggatgctcccaggtaataaactgtgcatcttcacgcgccagcgccacttcacgatcaaaggtgatggtgatgccatcttcgctcaggccagggaagtccggcaccagcatatgatcggacggcgtcagcacgatcatgttgtcgccgcgatcgtcctgattgataccgataatatcgaacaggttcatggcgaaggcgatcaggttggtatcgtcatcctgctcttcaatgctttctgccagtgcctgggctttttcgccaccgttggagtggatttccagcaggcggtcacgaccctgttccagctgtgctttcagcgcttcatgttgctcgcggcagtttttgatcagatcgtcaaagccttcggtttgatccggactagccagatagttaatcagatcgttgtatacgctatcgtaaatagtgcgtccggtcgggcaggtgtgctcaaatgcatccagaccttcgtgataccagcgcaccagcacgctctgagcggttttctccagataaggcacatggatctgaatatcgtgcgcctggccgatacgatccagacgaccaatacgctgctccagtagatccgggttgaatggcaggtcaaacatcaccatgtggctggcgaactggaagttacgtccttcagaaccgatttcactgcacagcagtacctgtgcgccggtgtcttcttcggcaaaccaggcggcagcgcggtcacgttcgataatgctcataccttcgtggaacaccgcagcgcgaataccttcacgttcgcgcagtacctgctccagttgcagcgcagtggcagctttggcgcagatcaccagcactttctgagagcgatggctggtcaggtagcccatcagccactcaacgcgcggatcgaagttccaccaggtggcgttatcaccttcaaattcctgataaatacgctccgggtagagcatatcgcgagcacgatcttccgcacttttacgtgcgcccataatgccggagactttaatagccgtctgatactgcgtcggtagcggcagcttaatggtgtgcagctcgcgtttcgggaatcctttcacaccgttacgcgtgttacggaacagcacgcggctggtgccgtggcgatccatcagcatgctaaccagctcctgacgggcgctctgggcatcttcgctgtcgctgtttgctgcctgcaacagcggctcgatatcctgctcgccgatcatctcgccgagcatgttcagttcgtcattgctcagtttgttacctgccagcagcatggcaacggcgtccgcaaccggacgataatttttctgctcttcaacgaactgcgcaaaatcgtggaaacggttcgggtccagcagacgcagacgggcgaagtggctttccatccccagctgttccggggtcgcggtcagcagcagaacgcccggcacgtgctctgccagttgttcaatggcctgatattcacggcttggcgcatcttcgctccacaccaggtgatgcgcttcatcgaccaccagcaggtcccattcggcttcacagagatgttccaggcgctgtttgctacgacgggcaaaatccaggctgcaaatcaccagctgttcggtgtcaaacgggttgtaagcatcgtgctgagcttcggcataacgctcatcatcaaatagcgcaaagcgcaggttgaaacggcgcagcatttctaccagccactgatgctgtaaggtttccgggacgataattagcacacgttcagcagcgccagagagcagttgctgatgcaggatcatcccggcttcaatggttttccctaaacccacttcgtcagccagcaggacgcgcggcgcgtggcggcgaccaacatcatgagcgatgttgagctgatgcgggatcaggctggtacgctgaccgcgcaggccgctgtacggcatacggaactgttcgctggaatatttacgcgcgcgataacgcagcgcaaagcggtccatacggtcaatctgcccggcaaacagacggtcctgcggtttgctgaacaccagtttgctatcaaggaaaacttcacgcagggctacgccggactcttcagtatccaggcgagtaccgatataggtcagcaagccattttcttcttttacttcttcgacttgcatctgccagccgtcatggctggtaatggtatcaccagggttgaacatcacgcgggtcacgggggaatcactgcgtgcgtacagacggttttcaccagtagatgggaaaagtaaagtgacagttcgcgcatccaccgcgacaacggttccaagtcccaattcgctttctgtatcgctgatccagcgttgaccaagtgtaaaaggcatatgtgttcggctctatatctttaattgcaggcaataaccacccgctaccgtgcttatgaggtagtggtgttattcaggtccaggaatggaaagggcgctatggtactggatggcaaagcattcgtcacgcatcaaaatggtatctggcgaactcttttttttgctcaaaatagcccaagttgcccggtcataagtgtagcaaaattatcctcaataaaagggagtattccctccgccacgggttgtagctggcgggtcagatagtgttcgtaatccagtggactacgttggtagtccagcggctccgggccgttggtggtccatacgtacttaatggtgccgcgattctgatattgcaaggggcgaccacgcttttggttttcttcatcggcaaggcgagcggcgcgtacatgaggcggcacattacgctgatactcgctcagcggacggcgaaggcgtttacggtaaaccagtcgcgcatccagttcacccgccatcagtttgtcgatggtttcgcgtacatattcctgatatggctcgttgcggaagatgcgcaggtatagctcctgctgaaactgctgggccagcggcgtccagtcggtgcgcacggtttccagccctttaaacaccatccgctgcttgtcgccctcctgaatcagtccggcataacgctttttactgccggtatcggctccgcgaatggttggcatcagaaaacggcagaaatgggtttcatactccagttctaatgcgctggtcagccgttgtttttgcagcgtttccgcccaccaggcgttaacgtgctgcaccagtgcacgaccgattttcgccgcttcttcttcgctatgtgcgcctttcagccagacaaacgtactgtcggtatcgccgtagataacgtcgtagccctgtgcttcaatcaacgctttggtttgccgcatgatctgatgaccacgcatggtgatgctgcttgccagccgcggatcgaagaagcggcaggcggtggtgccgagcacgccataaaaggcattcatgatgattttcagcgcctggctcagcggtttgttaccctggcgtttggcttcatcgcgcccgtgccagatgttagtcacaatctccggcaggcaatgtttttctcggctgaaccaggcatcgagaaaaccttcggtactgtgctctggatcaggctgcgccatgccttccaccagcccgacgggatcaatcagaaaggtgcggatgatgctcgggtacaggcttttatagtccagcaccagcacactatcataaagccctggccgactatccatcacgtagccgccagggctggcgtgcggcggcacttcgccgagattaggcgcgacataaccagcgcgatgcattcgcggaaaatagagatgaccaaatgccgccacgctaccgccgtgtcggtccaccggcaggccgttcaccgttgcccgttcgagtaaaaatggcatgatttcagttttgtggaagatctgcgtcaccagctcgcaatctttcaggttataagttgccagcgcaggtttatcttcggcgaaacggcggtcaatttcgtccattcgatcccacgggttatcgatagattttccttcgcctaatagctcctgagcgacagtttccaggctgaaactagagaaattccagaacgcggatttcagcgcctcgataccgtcgataattagccgacctttagcctgggcaaaaaagacgccgtttttaaagccgtgctcgcgccactccagctcgctattatcgcgcccaagacgcagcggaagacggtaacgctcggcatgtttttgcagcattcgcagatcgaactgcaccacgttccaaccgatgatcacatcaggatcgtagttggcaaaccaggcgttgagtttttccagcaactgcgggcggctggcgacgtattccagttcgaaatcaaggctggaggcgtcgccattctccggccccagcatataaacgatgcgctgcccgcagccttccaggccgatgcagtacagctcaccgtggcgggtggtttcaatatctatagaaacccacttgagcggcggacgatagtcgggatgcggtttcagacgggcattaacgatagtgccattgtgcatatcaccctcgacccacaccggactggtgataaaccgctccatcagatagcgttctggcggacgcacatcggcctcgtagacggtaacgccaccttcacgcaggcgcttttcgtaattcatcaattggcgatgggcgcgacagtaaaggccatacaccggctggcggtgaaaatcctttaacgccagcggtgtcaggcgaaagccttgttcaccctgcaaaatatgctgagcgcggggaacctgatcggcgggaataaacgccacggactcttgcggtgcaagcgtaacctgcaacggcccgttgtccgtcgccagccagaaggagacttctgtcccttgcggggtgtcccgccagtgtcgggttaagataaaacctgcctgcgccacgctgaaaatccatcaaaaaaccaggcttgagtatagcctggtttcgtttgattggctgtggttttatacagtcattactgcccgtaatatgccttcgcgccatgcttacgcagatagtgtttatccagcagcgtttgctgcatatccggtaactgcggcgctaactgacggcagaatatccccatataagcgacctcttccagcacgatggcgttatgcaccgcatcttcggcatttttgccccatgcaaacgggccgtgggaatggaccagaacgccgggcatttgcgctgcatcgataccctgtttttcaaaggtttctacgatgacgttaccggtttcccactcatattcgccgttgatttctgcgtcggtcattttgcgggtgcagggaatggtgccgtagaaatagtcggcgtgggtggtgccggttgctggaatgctctgacccgcctgcgcccagatggtggcgtggcggctgtgcgtatgcacaatgccgccaatggaggggaatgcctgatagagcagccggtgagttggcgtgtcggaggagggctttttcgtaccttcaaccacttcaccggtttcgatgctaaccacgaccatatcgtcagcggtcatgacgctgtaatcgacgccggaaggtttgatcacaaagacgccgcgctcgcgatcaacggcgctgacgttgccccatgtgagcgtgaccaggttgtgttttggcagcgccaggttggcttctaatacctggcgtttgagatcttctaacatgttgactccttcgtgccggatgcgctttgcttatccggcctacaaaatcgcagcgtgtaggcctgataagacgcgccagcgtcgcatcaggcgttgaatgccggatgcgctttgcttatccggcctacaaaatcgcagcgcgtaggcctgataagacgcgccagcgtcgcatcaggcgttgaatgccggatgcgctttgcttatccggcctacaaaatcgcagcgtgtaggccagataagacgcgtcagcgtcgcatcaggcgttacataccggatgcggctacttagcgacgaaacccgtaatacacttcgttccagcgcagcgcgtctttaaacgctggcaggcgtgtgtcgttatcaatcaccgtgatttcaatgtcgtgcatctcggcgaattggcgcatatcgttgaggttcagtgcatggctgaagacggtatggtgcgcgccaccagcgaggatccacgcttcggaagcagttggcagatccggttgcgctttccacagcgcattcgccaccggcagtttcggcagggagtgcggtgttttcaccgtgtcgatgcagttaaccagtagacggtaacgatcgccgagatcaatcaagctggcgacaatcgctgggccggtttgggtattgaagatcaggcgggcaggatcgtccttaccaccaataccgagatgctgaacgtcgaggatcggtttctcttctgcggcgatgctcgggcagacttccagcatatgggagccgagcaccaggtcattacctttctcgaagtgataggtgtagtcctccataaaggaggtgccgccctgcagaccggtactcatcaccttcatgatgcgaagcagggcggcagttttccagtcgccttcgcccgcaaagccgtaaccctgctgcatcagacgctgtacggccagaccaggaagctgtttcagaccgtgcaaatcttcaaaggtggtggtgaacgcgtggaagccaccttgttccaggaaacgcttcatccccagctcaatacgcgccgcttccagcacgttctgtcgttttttgccgtggatttgtgtggcaggcgtcatggtgtagcagctttcgtactcatcgaccagcgcgttaacatcgccgtcgctgatggagttcaccacctgcaccagatcgccaaccgcccaggtattgacggagaaaccgaacttgatctgtgcggcaactttatcgccatcggtgaccgccacttcacgcatgttatcgccaaatcggcagactttcagatgacgggtatcctgtttagagaccgcctgacgcatccaggagccgatacgctcatgggcttgtttatcctgccagtgaccggtaaccacggcatgttgctgacgcatacgcgcgccaatgaagccgaactcgcgaccgccatgtgcagtctggttcaggttcataaagtccatatcgatactgtcccacggcagcgccgcgttgaactgggtgtggaattgcagcaacggtttgttgagcatggtcaggccgttgatccacattttggccggggagaaggtgtgcagccacaccaccagaccagcgcaacgatcgtcgtaattcgcgtcgcggcaaatagcggtgatttcatccggcgtggtgcccagcggtttcaacaccagtttgcagggcagtttcgcttccgtattcagcgcattaacgacgtgctcggcatgttgggtgacctgacgcagggtttccgggccatacagatgctggctgccaatgacaaaccacacttcataattatcaaaaatcgtcattatcgtgtccttatagagtcgcaacggcctgggcagcctgtgccggggcggaagttggaagatagtgttgttcggcgctcatcgcccattgctgatagcggcgataaagctgttcaaagcgttgtgcctgctcgctgcacggttgcagggttttctctaccgcactggccattttttgctgagcacttgggatgtctgcgtgcactttcgcggcgacggcagcaaaaatcgccgcaccgagcgcacagcactggtcagaggcaacaatttgcagcgggcgattcagcacgtcgcagcaggcctgcataatgacctggtttttccgcgcgatgccgcccagtgccatcacgttattaacggcgatcccctgatcggtaaagcactccatgattgcgcgtgcgccaaaggcggtggcagcaatcaaaccgccgaacagcagcggagcgtcggtagcgaggttaagatcggtaatcacccctttcaggcgttggttagcgttcggtgtgcggcggccgttaaaccagtcgagcaccaccggcaggtgatccagagacggatttttggcccatgcttcggtcagcgccggaagcagttgtttctggctggcgttgatttgcgttttcagttccggatgctgggcggcaagctgttccagcggccagccgagtacgcgaccaaaccaggcgtagatatcaccaaacgcgctttggcctgcttccagaccgataaatccaggcaccacgctgccatcaacctgaccgcaaatacctttaactgcccgctcgccaacgctctgtttgtcggcaatcagaatgtcgcaggtggaagtaccgataacttttaccagtgcgttaggctgtgcgcctgcgccaactgcgcccatatggcagtcaaacgcgccgccggaaatcaccacgctttcaggcaggccgagacgctgcgcccattccgggcataaggtgcccaccggaatatcggcagtccaagtgtcagtgaacagcggggaaggcaaatggcgattgaggatcgggtccagctcatcaaagaaactggctggcggcaggccgccccagctttcgtgccacagagatttatgcccggcgctgcaacgtccgcgacgaatatcctgcgggcgggtggtaccggaaagcagagctggcacccagtcgcacagctcaatccagcttgcggcagattgcgccacggcgctgtcctggcgagtcacatgcaggatttttgcccagaaccattcgctggaataaataccaccaatgtagcgggagtagtcaacgttgcccggcgcgtggcacaaacgggtaatctcttccgcttcttcaaccgcagtgtggtctttccacaatacgaacatcgcgttcgggttttcggcaaactccgggcgcagcgccagcacgtttccgtcggcatcaatcggtgcgggcgtgctgccggtactgtcaacgccaatcccgaccacagctgcgcgctgttcgacgctaagctctgcaagcacggttttcagtgccgcttccatactctcaatgtagtcacgcggatgatgacggaactggttattcggggcatcacaaaattgccctttctgccaacggggataccactctacgctggtggcgatctcttcaccggtagcgcagtccaccgccaaagctcgcacagaatcactgccaaaatcgaggccaattgcaatcgccatcgtttcactccatccaaaaaaacgggtatggagaaacagtagagagttgcgataaaaagcgtcaggtaggatccgctaatcttatggataaaaatgctatggcatagcaaagtgtgacgccgtgcaaataatcaatgtggacttttctgccgtgattatagacacttttgttacgcgtttttgtcatggctttggtcccgctttgttacagaatgcttttaataagcggggttaccggttgggttagcgagaagagccagtaaaagacgcagtgacggcaatgtctgatgcaatatggacaattggtttcttctctgaatggtgggagtatgaaaagtatggctgaagcgcaaaatgatcccctgctgccgggatacagctttaacgcccatctggtggcgggtttaacgccgattgaggccaacggttatctcgatttttttatcgaccgaccgctgggaatgaaaggttatattctcaatctcaccattcgcggtcagggggtggtgaaaaatcagggacgagaatttgtctgccgaccgggtgatattttgctgttcccgccaggagagattcatcactacggtcgtcatccggaggctcgcgaatggtatcaccagtgggtttactttcgtccgcgcgcctactggcatgaatggcttaactggccgagtatatttgccaatacgggtttctttcgcccggatgaagcgcaccagccgcatttcagcgacctgtttgggcaaatcattaacgccgggcaaggggaagggcgctatagcgagctgctggcgataaatctgcttgagcaattgttactgcggcgcatggaagcgattaacgagagcctccatccaccgatggataatcgggtacgcgaggcttgtcagtacatcagcgatcacctggcagacagcaattttgatatcgccagcgtcgcacagcatgtttgcttgagcccgagccgtctgagtcatcttttccgccagcagttagggattagcgtcttaagctggcgcgaggaccaacgcattagtcaggcgaagctgcttttgagcactacccggatgcctatcgccaccgtcggtcgcaatgttggttttgacgatcaactctatttcagccgagtatttaaaaaatgcaccggggccagcccgagcgagtttcgtgccggttgtgaagaaaaagtgaatgatgtagccgtcaagttgagttaattggtaacgaatcagacaattgacggcttgacggagtagcatagggtttgcagaatccctgcttcgtccatttgacaggcacattatgcaagcattgctggaacactttattacccaatccaccgtgtatagtttgatggcggtggtgttggtggcctttctggagagcctggcgctggtcggtttgattctacccggtacggtgctgatggcggggctgggagcgctgattggcagcggcgagttaagtttctggcacgcctggctggcagggattattggctgcttgatgggcgactggatttctttctggctgggttggcgttttaaaaagccgttgcatcgctggagttttctgaagaaaaacaaagcactacttgataaaactgaacatgcgttgcatcaacacagcatgttcaccattctggtcggtcgttttgttggcccgacgcgtccgctggtgccaatggtggcgggaatgctggatctgccggtggctaaatttattacgccgaatattatcggctgcctgctgtggccgccgttttacttcctgccagggattctggcgggcgcggcgatcgatattcctgccggaatgcagagcggtgagtttaaatggttgctgctggcaacagcggtgtttttgtgggttggtggctggctgtgctggcggttatggcgcagcggtaaagcgactgaccgtttgagtcattatttgtcccgcggtcgtttgttgtggctgacgccgttgatttctgccatcggcgtggtggcgctggtggtgttaattcgccacccgttgatgccggtgtatatcgatattttgcgtaaagtggttggggtttaagagatagtcttgtgcgggttgcctgatgcgacgcttgccgcgtcttatcaggcctacaaaacgcactacccgtaggtcggataaggcgttcacgccgcatccgacagtgcatattaacccgtaatccccaatagtgcgctagcactcgccttaccgctcaacaactcattggtcataccctgccaggcgatgcgcccgtcggcgactactacgctgcgcgtggcgatccgcgccgcatcttccacgctgtggctcaccatcaatagcgtcattttttgctgctggcagctcgtgctcaccagcgtcaacatctcctgacgtaacgccggatcgagcgcagagaacggttcatcgagcaataaaatcggctgttcgcgtaccagacaacgcgctaacgccactcgctgtcgctgaccgccggaaagctcgcccggtaaccgcgccattaaattatcaatccccatctggcgggcgatagcgtgcattttcccctgctgtaccgcgttcagtttcaatcccggatttagccccagcccgatgttctgtgcgaccgtcaggtggctgaacaggttgttctcctgaaacagcatgctcaccggacggcgactcggcggcatagttgtgtgatctacgccatcgatagtcaggctaccgctggctggcgtcagaaaaccggcgatcaaattcagcagggtacttttacccgcgccgcttggcccgaggatcgccacctgctcgccgcgttccaccgttaagctaaaacgcatcggcaaatggtggtaaagccaggtgatatcagtcagttttaacatttcgccccggtagtttttcaatcacggtaaacagcagaaaacagagcagcagcagaattaacgcggtgaccgcaccgtcctggctgcgataggagccaatttgctggtagagataaaacggcagggtgcggaaatcatcgttaccgaacaacgccaccacgccaaaatcaccaatgctcagcacgcatgcaaaggccagcgcctgcgccagtggacgtttcagggcgcgcagctccaccacttttaagcgactccagccttcaatccccaggctctgacataacatgctgtagcgggcggtgatatcgcgcatcgggttttccagcactttcagcgcataagggatcgccattaacgcattggtgaaaatcacaatgccgtcagcagattgtggcaggccgatagtgttgttgagcagtaaaaagaagccggtagccagcacaatccccggcatggcgaggatcaacatgccgctcatctccagcacctgacccgccagcattttctgccgcgcccgcagttcgcgactgctccatagcagcatcatggtcagcactacgcacaatacacctgccgccagcgcaatacgcaagctggtccacagcgcctgccacagcaccggttgtgccagcacttccggcaactggcgatttaccccatcgacgatcaccgccagtaacggtggcagcaacagcagcagcgccagcacaattaacaccgtgtcgcaaatgcggctatgcagacgatcgtccgggtcgcgccagccttgcagcagcgtggtgccgggcgcaatggccttactcaatcgctgactcaacagcaccagcccgaggcagcacaccatctggagcagcgccagcattgccgcgcgggcaggatcgtagtcgtaactcagcgcctgatagattgccagctcgatagtggtcgcctgcggaccgccccccaggcttagcacggtggcgaagctggcgaaacagagcataaagataagcgcagcaaccggcgggatttgtcgccgtaaccacggccattcgacgaagcggaaaaaatgccagctacgcatcccaagctgggcggcaagttgacgctgttcgccggggatgttttccagtgcctggagtaataagcggctcgccatcggcagattaaaaaacacatgggccagcaaaataccttgcaggccgtaggggctaaaggtccactccagaccgaggctttggcagagtgttgccagccagccctggcgaccatagacgctaagaatgccgaaaacagcgaccaacaccgggaggatcaaggtcattgcacacagacgcaacagcgccagccgacccggaaagcgcctgcgatagagcgcgcgggcgaggaatatcgcgggtatgacagagagcagtgcgctgagaaacgcctgccagaaggagaagcgcaccacatgccacagatagctgtcctgccagactgccacccagtcatcctgcggcgcgttccaccacagggcgagaaacgccgccagcgcaaccgctaccaccagcgtggtggcgcttacacctggaattaaccagccgggaattaacggctgacggcgcgttgccattcgctaatccatgcctgacgttgtgccgccacttcggctggcgtgaactccaacgtggttgcgggtttggtcaatttttcaaaaccggcaggcagcgtgacgtttgccaccggatacatccagttgccggttgggatcgcattctggaaagccggagaaaccataaactggaggaatttttgcgccagctccggctgcttgctggcagcggtgcgggcggcgacttccacttgcagatagtgaccttcgctgaagttcgcggcggcgtagttatctttcttctcttcgagaatgtgataagccggagaggtggtgtaactcagtaccagatcgctttcaccttttaaaaacaggccgtaggcttcgctccagcctttggtgaccgtgaccgttttcttcgccagtttctgccaggcttgtggggcgtcatcgccatagactttttgcatccatagcaacagacccagccccggtgtactggtgcgcggatcctgataaatcacccgccagttttgatcgctctcaaccagttctttcaggctttgtggcgggtttttcagtttgttcttgtcataaacgaaggcgaagtagccataatcaaacggtacgaaagtgtcattattccagccgccgggaacgttaacggcatccgctgccacaccgcttttggcaaacagtccggttttactggcggcgtctaacaggttgttatccagccccagcaccacatcggctttactgtttttgccttccatccgtagacggttgagaaggctaacgccatcttccagcgccaccagtttcagttcgcaattacagtcggcttcaaaggcttttttaaccaccggaccaggcccccagtcggcggcgaaggaatcgtaggtataaacagtcagaacgggtttagcgaaaacgggcgctgtgcacagcaacagcaggggcagacatttttttaacactttgcacctcaaaaaagagtggcaaaggacttgagaaggagcctcaaatcccttcgccggcgttatccggatcaggttcgacgggtattttctcagcgcacgcgtacgcgtggcaccccgttgagaacggcgttagtgtagtgattttgttatcaaccagcaatcatggatccggtggcgcaaaccacgcacttttaaaatcgaaccagccgagggtattcatgcgcaggccgcgcatactgcgttgcccctgaatgatcagccagtggtgcaataatggcaccatcgctttgctggcgaccagttgctggcaccagttcgccagattcatctcgccattgcgccagcgagcagcgtcggcttgccagtcaatgggaatgcaatgttgtagcagtggcacttcgcataaatgtgcgaaaacagagaagtccagcggcagggtaaagttggcgctgtttagccagatatcactttcgatctctcctgtatgccactgatcgtagtcgatctctttgattttcagcgtgacctggtgacttgccagaatctgctgcatgatcccggcaatcacccgatgctcactgtgatcctgataaaaggttagggtgaggctttccaggccagccggtttttcgctctttatggtgcgggcatggtgccaacgggggagcagtccataagccgggaaccacagttgctggtactgttcctcagcgaaatagaccagattagttggagaaagcacatagcttacccagtccctgacttgctgattcgccccgcgatgggtgcggctgtcgaacagtaaatagtagcaaccttcctccaggcggctttcaatctctttttcctcgccctgtggaccttttagcatcagccctccggctggctcgtcggcaatttccggcagaacccagacgttaacttcgtcgattaatgcccggtaaccgaagaagtcatcgaatgcctgaattttcagttgattggtgctgttgcgaatcaccgcatacggaccggtgccgatgggatggctggcaaagttactgagggtttcccattcgcgcggcaggatcatcgccggaacttgccccagcagtaacggtaaccagcggtccggttgcgtgagatggatatccagcgtccagggcgtcgggctcacaatgtcagcaatatggctatagagcggcagcgtattgattcgttttaaagaggcgatcacatcgtccatttccagttcacgaccatggtgaaaatggactcctggacgcaaaaagaaacgccagtgaagcggactaatttgctgccagtggtgggcgatgtctgcttccagttccccattttcctcatttatgcgcgttaggctactgaagatttgccgggcgatatgggtttcggaacggcgcaatgcgctgccaggtagcagattacgcaacggacgatagtagagcacgcgcaggatgtgccgcccctggcggaagctgcggcccagatgagaaaccagcatttgccgcacagtcgctttgtcgccaaccaactgcaccagttgatcgatacgatcctgctccagcaggtcttccgcccgctgttgctgaagcgccagcccggtatagaggaatgtcagacggctgcgtttaccgcgcccgacttccgcttcccacgtcagccagccgcgatcctgcatggtgttgagcagggtgcgcatatgacgacggctgcagctcaataacgctgccagttcgttgagcgttgtgtcctggcttttaccctcgcagcattgccacaggcggatgaactgttgttgcagacgagcagatggcataaaaggggaactcctgtgcaaaagacagcaattttattttccctatattaagtcaataattcctaacgatgaagcaagggggtgccccatgcgtcagttttatcagcactattttaccgcgacagcgaagttgtgctggttgcgttggttaagcgtcccacaacgattaaccatgcttgaaggactgatgcagtgggatgaccgcaattctgaaagttgacttgcctgcatcatgtgtgactgagtattggtgtaaaatcacccgccagcagattatacctgctggttttttttattctcgccgcgctaaaaagggaacgtatgatctggataatgacgatggctcgccgtatgaacggtgtttacgcggcatttatgctggtcgcttttatgatgggggtggccggggcgctacaggctcctacattgagcttatttctgagtcgtgaggttggcgcgcaacctttctggatcggcctcttttatacggtgaatgctattgctgggatcggcgtaagcctctggttggcaaaacgttctgacagtcagggcgatcggcgaaaactgattatattttgctgtttgatggctatcggcaatgcgctattgtttgcatttaatcgtcattatctgacgcttatcacctgtggtgtgcttctggcatctctggccaatacggcaatgccacagttatttgctctggcgcgggaatatgcggataacagcgcgcgagaagtggtgatgtttagcagcgtgatgcgtgcgcagctttctctggcatgggttatcggtccaccgttggcctttatgctggcgttgaattacggctttacggtgatgtttagcattgccgccgggatattcacactcagtctggtattgattgcatttatgcttccgtctgtggcgcgggtagaactgccgagcgaaaatgctttaagtatgcaaggtggctggcaggatagtaacgtacggatgttatttgtcgccagcacgttaatgtggacctgcaacaccatgtacattattgatatgccgttgtggatcagtagcgagttaggattgccagacaaactggcgggtttcctgatggggacggcagctggactggaaataccagcaatgattctggctggctactatgtcaaacgttatggtaagcggcgaatgatggtcatagcagtggcggcaggagtactgttttacaccggattgattttctttaatagccgtatggcgttgatgacgctgcaactttttaacgctgtatttatcggcattgttgcgggtattgggatgctatggtttcaggatttaatgcctggaagagcgggggcagctaccaccttatttactaacagtatttctaccggggtaattctggctggcgttattcagggagcaattgcacaaagttgggggcactttgctgtctactgggtaattgcggttatttctgttgtcgcattatttttaaccgcaaaggttaaagacgtttgatgacgtggacgatagcggaaagcccggtcatttgaccgggcaaggggattaattcataaacgcaggttgttttgcttcataagcggcaatggcgtcgtcgtgctgcaaggtaagcccaatactgtccagaccgttcatcatgcagtggcggcggaaggcatcgatggtaaagcgataggttttctctcccgctttcacctcttgcgcttccagatccacgtcgaaatggatccccggattagctttcaccagcgcaaacagttcgtccacttctgcatcgcttaatttcaccggcagcagctggttgttaaagctattgccgtagaagatgtcagcaaaactcggcgcaatcaccactttaaaaccgtagtcggtcaatgcccagggcgcgtgctcacggctagagccacagccgaagttttctcgtgccagcaaaatggaagcgccctgatactgcgggaagttcagcacgaagtccgggtttggctgttggcctttttcatccagaaaacgccagtcgttaaacagatgcgcgccaaaacccgtacgggtcactttctgcaaaaactgtttcgggatgattgcatcggtatcgacattggcggcatccagcggaaccaccaggcctgtgtgtttgataaatttctctgccatggtgtgctccttatttaatgttgcgaatgtcggcgaaatgtccggtcacagcagcagcggcagccattgccgggctgaccagatgcgtgcgcccgccgcgcccctggcggccttcaaagttacggttgctggtggaggcacaacgttcgcccggattcagacggtcgttgttcatcgccagacacatactgcagccaggcaagcgccattcaaaaccggcttcaataaagattttatccagaccttccgcttccgcctgggcttttaccgggccagagccgggaaccaccagtgcctgcacgcctggcgcgacttttcgccctttggcgatctccgctgccgcgcgtaaatcttcaatgcggctgttggtacaggaaccgataaacactttgtcgatagccacttcggtcagcggaatacccggtttcagccccatataggccagcgctttttctgcgctcgcgcgttcaaccggatcggcaaagctagccggatcgggaatattgtcgttcacggaaatcacctggccgggattggtgccccaggtgacctgcggactaatttcttctgcttgcagagtgacaacggtatcgaaagttgcgccttcgtcggtttgcagggttttccagtaggcaacggcgtcgtcgaaatctttgcctttcggcgcatgcagacggcctttgacatagttaaaggtggtttcgtccggtgcaaccagaccggcttttgcgcccatttcgattgccatattgcacagggtcatacgaccttccatgcttaaatcacggattgcttcgccgcaaaactccaccacatgcccggtgccgcctgcgctaccggttttaccgataattgccagcacgatatcttttgcggtaatgcccggcgcggctttgccctggacttcaattttcatggtttttgcgcggccctgtttcagggtttgcgttgccagtacgtgttcaacttcggaagtgccgataccaaaggccagtgcgccaaacgcgccgtgggtggcggtatggctgtcgccgcagacaatggtcatccccggcaaggtgacgccctgttccggccccattacgtggacgatcccctgatacgggtgattcaggtcatacagttcgacgccaaattctttgcagtttttgatcagttcctgcatctggatacgcgccatttcaccgcaggcattaatgtctttggtctgggtagagacgttgtgatccatggtagcgaaggttttgcccggctgacgtaccgggcgaccgtgggcgcgcagaccatcgaacgcctgcggactggtcacttcatgcaccaggtggcggtcgatatataacagtggggtttcgttttcggcttcgtacacaacgtgagcgtcgaacaatttttcgtataacgtcttagccatgattacaccccttctgctacatagcgggcaatgatatcgcccatttcatcggtactaacggcggcagcgccacgggctaaatccccggtgcgaatgccttcttctaatgcgcggttaatggcgcgttcaatggcgcaagccgcatcatcggcatccaggctgtaacgcagcagcagtgccaggctaaggatttgtgcaatcgggttggcgatgtttttgcctgcgatatctggtgcgctgccgcccgccggttcatacagtccaaaaccttgctcgttcaggctggcggaaggcaacatccccatgctgccagtgatcattgcgcactcgtcagacagaatgtcgccaaacaggttggagcacagcagaacgtcaaactgacttggatctttaatcagctgcatggtggcgttgtcgatgtacatatgcgccagttcgacatccgggtattccgtggcgatctcgttaacgatctcccgccataaaatagaggattgcagcacgttggctttatcgatgctcgtcactttgtggcgacgcttgcgagcagattcaaacgcgatgcgggcgatacgttcgatctcaaaacggtgatacacctcggtatcaaaggctttttcatattgtccgctaccttcgcggccttttggctgaccgaaatagatgccgccggtcagttcgcgcacacacaggatgtcgaagccgtttgcggcaatgtctgcacgcagcggacagaatgcttccagcccctgatacagttttgccgggcgcaggttgctgaataatttgaagtgcttacgcagaggcagcagcgcgccgcgttctggttgctggtctggtggtaaatgttcccacttcgggccgcctacgctgccaaacagcacggcatcggcttgctcacaaccttcaaccgtcgcaggcggcagtggttgcccgtggttatcaatggctgcgccgcctacatcgtaatggctggtggtgatgcgcatcgcaaagcggttgcgcacggcatccagcactttcagcgcctgggtcatcacttccggaccaataccgtcccccggcaatacggcaatatggtaattcttgctcatcacacggtttccttgttgttttcgttgtgttgagctttgcgttgcaactctttttcgacttctgcggcacgccagatattgttcagaacgtgcaccatggctttggcagaactctcgacaatatcggtagccaggccgacgccgtggaagcggcgaccgttgtagttagcgacgatatccacctgacccagcgcatctttaccgtggcctttggcggtcaggctgtatttcaccagttcgacgttatattcagtgatgcggttaattgcctgatagacggcatcgaccggaccgttaccgttggcggcttctgctttgacttcttcgccacaggccagtttgacggcggcggtggcgatatcgttagagccagactgcacgctgaagtaatccagacggaaatgctccggctcttcttgctgcttaccgatgaaggccagcgcctccagatcgtaatcaaacacctgaccttttttgtccgccagcttcaggaaagcatcgtacaaattgtctaaattatattcactttctttataccccatctcatccatgcgatgtttcaccgccgcacgcccgctacgagaggtcagattcagctggatttggttcagaccaatagattctggtgtcatgatttcgtagttttcgcggtttttcagcacgccatcctggtgtataccggaggagtgtgcgaatgcgccgctgccaacaatggctttgtttgccgggatcggcatattacaaatctggctaactaactggctggtgcgccatatctcctggtgattaatggcggtgtggacgttgagaatatccttacgaactttgatcgccatgatgacttcttccagggaacagtttccggcacgctcgccgatcccgttcattgcgccttccacctggcgtgcaccggcatgtaccgccgccagactgtttccgaccgccaggcccaaatcgtcgtgggtatgtacggagataatggctttgtcgatgttaggcacgcgttcatacaggccgctgatgattccggcgaactcaaacggcatggtgtagcccacggtgtccggaatgttgatggtggtggcaccggcattaatcgccgcttcgaccactcgcgccagatcggcaatgggtgtacgcccggcatcttcgcaagaaaattcaacatcatcggtgtaattacgggcgcgtttcaccatatagatagcgcgttcgatcacctcgtccagcgtgctgcgcagcttggtggcgatgtgcattgggctagtggcaataaaggtatgaatacggaaggcttcggcgactttcagggattcggccgccacgtcgatatctttttccacgcagcgagctaacgcacatacgcggctgtttttaacctggcgggcgatggtttgcacgctttcaaaatcgcccgggctagagacggggaaaccgacttccatcacgtcaacacccatacgctcaagggccagcgcaatttgcagtttttctttcacactcaagcttgcctgtaacgcctgttcaccgtcgcgcaatgtggtatcgaaaataatgacttgctggctcatggtttgggtccttgtctcttttagagcgcctcgcttcgggcataaaaaaacccgcgcaatggcgcgggttttttgtttgactgcgtgctggcttaatgctggatgccgctcactcgtctaccgcgcaaagaagatgcgtttagtagtagtagaccgataaagcgaacgatgtgagtcattaaatcagctccagatgaatgcgatatgcttttagagttactggatacaaaaacggatgtcaaccctgacgcaataaaaacgtcccgccagcgtgagttctgcatccgtaaaattagctaattgtgctgcggtggttaaagtaagcgatattaatttctgcttaactaccgacgcttttcatcggttgacatatttcagcataaatttttgcatctaatcaacgaggaaaaaggggacaaaatgcacgcgttgcaaaacctatcctgatgatttgtattgaattatatgttttgcgattttttttgatattgatttggtgaatattattgatcaattaatgttaagaattaatgcattaaatatataaattaattattaaataagcacatttaatccattttgtagatgattgagtattcgcggtagttatgattagattgttttcgcaacaaaaacattatggattattatgctgtggtaaatgactcattccacggcaatggattctgtttttatcagaacccgtatctttatgttttccgaattttactcattttgctttttcttattttatatgcatgataaatcatattcttcaggattatttctctgcattccaataagggaaagggagttaagtgtgacagtggagttaagtatgccagaggtacaaacagatcatccagagacggcggagttaagcaaaccacagctacgcatggtcgatctcaacttattaaccgttttcgatgccgtgatgcaggagcaaaacattactcgtgccgctcatgttctgggaatgagccaacctgcggtcagtaacgctgttgcacgcctgaaggtgatgtttaatgacgagctttttgttcgttatggccgtggtattcaaccgactgctcgcgcatttcaactttttggtagtgttcgtcaggcattgcaactagtacaaaatgaattgcctggtagtggttttgaacccgcgagcagtgaacgtgtatttcatctttgtgtttgcagcccgttagacagcattctgaccagccagatttataatcacattgagcagattgcgccaaatatacatgttatgttcaagtctagtttaaatcagaacactgaacatcagctgcgttatcaggaaacggagtttgtgattagttatgaagacttccatcgtcctgaatttaccagcgtaccattatttaaagatgaaatggtgctggtagccagcaaaaatcatccaacaattaagggcccgttactgaaacatgatgtttataacgaacaacatgcggcggttagcctcgatcgtttcgcgagttttagtcaaccttggtatgacacggtagataagcaagccagtatcgcgtatcagggcatggcaatgatgagcgtacttagcgtggtgagccaaacgcatttggtcgctattgcgccgcgttggctggctgaagagttcgctgaatccttagaattacaggtattaccgctgccgttaaaacaaaacagcagaacctgttatctctcctggcatgaagctgccgggcgcgataaaggccatcagtggatggaagagcaattagtcagtatttgcaaacgctaactgattgcagaataggtcagacatgaatgtctggtttattctgcattttttattgaatgtagaattttattctgaatgtgtgggctctctattttaggattaattaaaaaaatagagaaattgctgtaagttgtgggattcagccgatttattatcaatttaatcctctgtaatggaggattttatcgtttcttttcacctttcctcctgtttattcttattaccccgtgtttatgtctctggctgccaattgcttaagcaagatcggacggttaatgtgttttacacattttttccgtcaaacagtgaggcaggccatggagatgttgtctggagccgagatggtcgtccgaagccttatcgatcagggcgttaaacaagtattcggttatcccggaggcgcagtccttgatatttatgatgcattgcataccgtgggtggtattgatcatgtattagttcgtcatgagcaggcggcggtgcatatggccgatggcctggcgcgcgcgaccggggaagtcggcgtcgtgctggtaacgagcggtccaggggcgaccaatgcgattactggcatcgccaccgcttatatggattccattccattagttgtcctttccgggcaggtagcgaccagcttgataggttacgatgcctttcaggagtgcgacatggtggggattagccgaccggtggttaaacacagttttctggttaagcaaacggaagacattccgcaggtgctgaaaaaggctttctggctggcggcaagtggtcgcccaggaccagtagtcgttgatttaccgaaagatattcttaatccggcgaacaaattaccctatgtctggccggagagcgtcagtatgcgttcttacaatcccactactaccggacataaagggcaaattaagcgtgctctgcaaacgctggtagcggcaaaaaaaccggttgtctacgtaggcggtggggcaatcacggcgggctgccatcagcagttgaaagaaacggtggaggcgttgaatctgcccgttgtttgcagtttgatggggctgggggcgtttccggcaacgcatcgtcaggcactgggcatgctgggaatgcacggtacctacgaagccaatatgacgatgcataacgcggatgtgattttcgccgtcggggtacgatttgatgaccgaacgacgaacaatctggcaaagtactgcccaaatgccactgttctgcatatcgatattgatcctacttccatttctaaaaccgtgactgcggatatcccgattgtgggggatgctcgccaggtcctcgaacaaatgcttgaactcttgagccaagaatccgcccatcaaccactggatgagatccgcgactggtggcagcaaattgaacagtggcgcgctcgtcagtgcctgaaatatgacactcacagtgaaaagattaaaccgcaggcggtgatcgagactctttggcggttgacgaagggagacgcttacgtgacgtccgatgtcgggcagcaccagatgtttgctgcactttattatccattcgacaaaccgcgtcgctggatcaattccggtggcctcggcacgatgggttttggtttacctgcggcactgggcgtcaaaatggcgttgccagaagaaaccgtggtttgcgtcactggcgacggcagtattcagatgaacatccaggaactgtctaccgcgttgcaatacgagttgcccgtactggtggtgaatctcaataaccgctatctggggatggtgaagcagtggcaggacatgatctattccggccgtcatagtcaatcttatatgcaaagcctacccgatttcgtccgtctggcggaagcctatgggcatgtcgggatccagatttctcatccgcatgagctggaaagcaaacttagcgaggcgctggaacaggtgcgcaataatcgcctggtgtttgttgatgttaccgtcgatggcagcgagcacgtctacccgatgcagattcgcgggggcggaatggatgaaatgtggttaagcaaaacggagagaacctgattatgcgccggatattaagtgtcttactcgaaaatgaaagtggcgcgttatcccgcgtgattggccttttttcccagcgtggctacaacattgaaagcctgaccgttgcgccaaccgacgatccgacattaagccgtatgaccatccagaccgtgggcgatgaaaaagtacttgagcagatcgaaaagcaattacacaaactggtcgatgtcttgcgcgtgagtgagttggggcagggcgcgcatgttgagcgggaaatcatgctggtgaaaattcaggccagcggttacgggcgtgacgaagtgaaacgtaatacggaaatattccgtgggcaaattatcgatgtcacacccagcctttataccgttcaattagcaggcaccagcggtaagcttgatgcatttttagcaagcattcgcgatgtggcgaaaattgtggaggttgctcgctctggtgtggtcggacttagccgcggcgataaaataatgcgttgagaatgatctcaatgcgcaatttacagcccaacatgtcacgttgggctttttttgcgaaatcagtgggaacctggaataaaagcagttgccgcagttaattttctgcgcttagatgttaatgaatttaacccataccagtacaatggctatggtttttacattttacgcaaggggcaattgtgaaactggatgaaatcgctcggctggcgggagtgagccggaccactgcaagctatgttattaacggcaaagcgaagcaataccgtgtgagcgacaaaaccgttgaaaaagtcatggctgtggtgcgtgagcacaattaccacccgaacgccgtggcagctgggcttcgtgctggacgcacacgttctattggtcttgtgatccccgatctggagaacaccagctatacccgcatcgctaactatcttgaacgccaggcgcggcaacggggttatcaactgctgattgcctgcagtgaagatcagccagacaacgaaatgcggtgcattgagcaccttttacagcgtcaggttgatgccattattgttagcacgagcttgcctcctgagcatcctttttatcaacgctgggctaacgacccgttcccgattgtcgcgctggaccgcgccctcgatcgtgaacacttcaccagcgtggttggtgccgatcaggatgatgccgaaatgctggcggaagagttacgtaagtttcccgccgagacggtgctttatcttggtgcgctaccggagctttctgtcagcttcctgcgtgaacaaggtttccgtactgcctggaaagatgatccgcgcgaagtgcatttcctgtatgccaacagctatgagcgggaggcggctgcccagttattcgaaaaatggctggaaacgcatccgatgccgcaggcgctgttcacaacgagctttgcgttgttgcaaggagtgatggatgtcacgctgcgtcgcgacggcaaactgccttctgacctggcaattgccacctttggcgataacgaactgctcgacttcttacagtgtccggtgctggcagtggctcaacgtcaccgcgatgtcgcagagcgtgtgctggagattgtcctggcaagcctggacgaaccgcgtaagccaaaacctggtttaacgcgcattaaacgtaatctctatcgccgcggcgtgctcagccgtagctaagccgcgaacaaaaatacgcgccaggtgaatttccctctggcgcgtagagtacgggactggacatcaatatgcttaaagtaaataagactattcctgactattattgataaatgcttttaaacccgcccgttaattaactcaccagctgaaattcacaataattaagtgatatcgacagcgcgtttttgcattattttgttacatgcggcgatgaattgccgatttaacaaacacttttctttgcttttgcgcaaacccgctggcatcaagcgccacacagacgtaacaaggactgttaaccggggaagatatgtcctaaaatgccgctcgcgtcgcaaactgacactttatatttgctgtggaaaatagtgagtcattttaaaacggtgatgacgatgagggattttttcttacagctattcataacgttaatttgcttcgcacgttggacgtaaaataaacaacgctgatattagccgtaaacatcgggttttttacctcggtatgccttgtgactggcttgacaagcttttcctcagctccgtaaactcctttcagtgggaaattgtggggcaaagtgggaataaggggtgaggctggcatgttccggggagcaacgttagtcaatctcgacagcaaagggcgcttaagtgtgcctacccgttatcgggaacagctgcttgagaacgctgccggtcaaatggtttgcaccattgacatttatcacccgtgcctgctgctttaccccctgcctgaatgggaaattatcgagcaaaaattaagccgtctgagcagcatgaacccggttgagcgccgtgtgcagcgcctactgttaggtcatgccagcgaatgtcagatggatggcgcaggtcgattgttaatcgcgccagtactgcggcaacatgccgggctgacaaaagaagtgatgctggttggacagttcaacaagtttgagctgtgggatgaaacaacctggcatcaacaggtcaaggaagatatcgacgcagagcagttggctaccggagacttaagcgagcgactgcaggacttgtctctataaaatgatggaaaactataaacatactacggtgctgctggatgaagccgttaatggcctcaatatccgtcctgatggcatctacattgatgggacttttggtcgcggtggtcacagtcgtctgatcctcagccagcttggcgaagaggggcgtttgctggcgatcgatcgcgacccgcaggctatcgccgttgcgaagactattgatgatccgcgcttctccatcatccacggacctttctccgcgctgggcgaatacgttgccgagcgcgatcttatcggcaagatcgacggcattctcctcgatcttggcgtctctagtccgcaacttgatgatgctgaacgtggcttttcctttatgcgcgatggtccgctggacatgcgtatggacccaacccgtgggcagagtgccgctgaatggctacaaaccgcagaagaagccgatatcgcctgggtattgaaaacctatggtgaagagcgttttgccaaacgcattgcccgcgccattgtcgagcgtaaccgcgaacagccgatgacccgcaccaaagaactggcggaagtcgtggctgctgcaacgccggtgaaagataagtttaaacatcccgcgacccgtaccttccaggcggtgcgcatttgggtaaacagtgaactggaggagatagagcaggcgctaaaaagcagcctcaacgtgctggccccgggtgggcggcttagcatcatcagcttccacagcctggaagaccgtattgtgaaacgttttatgcgtgaaaacagccgcggtccgcaagttccggcagggttaccgatgactgaagagcagctcaaaaaactgggtggccgtcagctgcgagcactaggcaagttaatgccgggcgaagaagaggtggctgagaaccctcgtgcccgtagtagtgttctgcgtattgcagagaggacgaatgcatgatcagcagagtgacagaagctctaagcaaagttaaaggaagcatgggaagccacgagcgccatgcattgcctggtgttatcggtgacgatcttttgcgatttgggaagctgccactctgcctgttcatttgcattattttgacggcggtgactgtggtaaccacggcgcaccatacccgtttactgaccgctcagcgcgaacaactggtgctggagcgagatgctttagacattgaatggcgcaacctgatccttgaagagaatgcgctcggcgaccatagccgggtggaaaggatcgccacggaaaagctgcaaatgcagcatgttgatccgagtcaagaaaatatcgtagtgcaaaaataaggataaacgcgacgcatgaaagcagcggcgaaaacgcagaaaccaaaacgtcaggaagaacatgccaactttatcagttggcgttttgcgttgttatgcggctgtattctcctggcgctggcttttctgctcggacgcgtagcgtggttacaagttatctccccggatatgctggtgaaagagggcgacatgcgttctcttcgcgttcagcaagtttccacctcccgcggcatgattactgaccgttctggtcgcccgttagcggtgagcgtgccggtaaaagcgatttgggctgacccgaaagaagtgcatgacgctggcggtatcagcgtcggtgaccgctggaaggcgctggctaacgcgctcaatattccgctggatcagcttagtgcccgcattaacgccaacccgaaagggcgctttatttatctggcgcgtcaggtgaaccctgacatggcggactacatcaaaaaactgaaactgccggggattcatctgcgtgaagagtctcgccgttactatccgtccggcgaagtgactgctcacctcatcggctttactaacgtcgatagtcaagggattgagggcgttgagaagagtttcgataaatggcttaccgggcagccgggtgagcgcattgtgcgtaaagaccgctatggtcgcgtaattgaagatatttcttctactgacagccaggcagcgcacaacctggcgctgagtattgatgaacgcctgcaggcgctggtttatcgcgaactgaacaacgcggtggcctttaacaaggctgaatctggtagcgccgtgctggtggatgtcaacaccggtgaagtgctggcgatggctaacagcccgagttacaaccctaacaatctgagcggcacgccgaaagaggcgatgcgtaaccgtaccatcaccgacgtgtttgaaccgggcagtacggttaaaccgatggtggtaatgaccgcgttgcaacgtggcgtggtgcgggaaaacagcgtactcaataccattccttatcgaattaacggccacgaaatcaaagacgtggcacgctacagcgaattaaccctgaccggggtattacagaagagcagtaacgtcggtgtttccaagctggcgttagcgatgccgtccagtgcgttagtagatacttacagtcgttttggactgggaaaagcgaccaatttggggttggtcggagaacgcagtggcttatatcctcaaaaacaacggtggtctgacatagagagggccaccttctctttcggctacgggctaatggtaacaccattacagttagcgcgagtctacgcaactatcggcagctacggcatttatcgcccactgagcattaccaaagttgaccccccggttcccggtgaacgtgtcttcccggaatccattgtccgcactgtggtgcatatgatggaaagcgtggcgctaccaggcggcggcggcgtgaaggcggcgattaaaggctatcgtatcgccattaaaaccggtaccgcgaaaaaggtcgggccggacggtcgctacatcaataaatatattgcttataccgcaggcgttgcgcctgcgagtcagccgcgcttcgcgctggttgttgttatcaacgatccgcaggcgggtaaatactacggcggcgccgtttccgcgccggtctttggtgccatcatgggcggcgtattgcgtaccatgaacatcgagccggatgcgctgacaacgggcgataaaaatgaatttgtgattaatcaaggcgaggggacaggtggcagaagctaaagcctgagcgcttcgcgctggttgttgttatcaacgatccgcaggcgggtaaatactacggcggcgccgtttccgcgccggtctttggtgccatcatgggcggcgtattgcgtaccatgaacatcgagccggatgcgctgacaacgggcgataaaaatgaatttgtgattaatcaaggcgaggggacaggtggcagatcgtaatttgcgcgaccttcttgctccgtgggtgccagacgcacctagccgagcactgcgagagatgacactcgacagccgtgtggctgcggcgggcgatctctttgtagctgtagtaggtcatcaggcggacgggcgtcgatatatcccgcaggcgatagcgcaaggtgtggctgccattattgcagaggcgaaagatgaggcgaccgatggtgaaatccgtgaaatgcacggcgtaccggtcatctatctcagccagctcaacgagcgtttatctgcactggcgggccgcttttaccatgaaccctctgacaatttacgtctcgtgggcgtaacgggcaccaacggcaaaaccacgactacccagctgttggcgcagtggagccaactgcttggcgaaatcagcgcggtaatgggcaccgttggtaacggcctgctggggaaagtgatcccgacagaaaatacaaccggtagcgcagtcgatgttcagcatgagctggcggggctggtggatcagggcgcgacgttttgcgcaatggaagtttcctcccacgggctggtacagcaccgtgtggcggcattgaaatttgcggcgagcgtctttaccaacttaagccgcgatcaccttgattatcatggtgatatggaacactacgaagccgcgaaatggctgctttattctgagcatcattgcggtcaggcgattattaacgccgacgatgaagtgggccgccgctggctggcaaaactgccggacgcggttgcggtaagtatggaagatcatattaatccgaactgtcacggacgctggttgaaagcgaccgaagtgaactatcacgacagcggtgcgacgattcgctttagcagtagttggggcgatggcgaaattgaaagccatctgatgggcgcttttaacgtcagcaacctgctgctcgcgctggcgacactgttggcactcggctatccactggctgatctgctgaaaaccgccgcgcgtctgcaaccggtttgcggacgtatggaagtgttcactgcgccaggcaaaccgacggtggtggtggattacgcgcatacgccggatgcactggaaaaagccttacaggcggcgcgtctgcactgtgcgggcaagctgtggtgtgtctttggctgtggtggcgatcgcgataaaggtaagcgtccactgatgggcgcaattgccgaagagtttgctgacgtggcggtggtgacggacgataacccgcgtaccgaagaaccgcgtgccatcatcaacgatattctggcgggaatgttagatgccggacatgccaaagtgatggaaggccgtgctgaagcggtgacttgcgccgttatgcaggctaaagagaatgatgtggtactggtcgcgggcaaaggccatgaagattaccagattgttggcaatcagcgtctggactactccgatcgcgtcacggtggcgcgtctgctgggggtgattgcatgattagcgtaacccttagccaacttaccgacattctcaacggtgaactgcaaggtgcagatatcacccttgatgctgtaaccactgatacccgaaaactgacgccgggctgcctgtttgttgccctgaaaggcgaacgttttgatgcccacgattttgccgaccaggcgaaagctggcggcgcaggcgcactactggttagccgtccgctggacatcgacctgccgcagttaatcgtcaaggatacgcgtctggcgtttggtgaactggctgcatgggttcgccagcaagttccggcgcgcgtggttgctctgacggggtcctccggcaaaacctccgttaaagagatgacggcggcgattttaagccagtgcggcaacacgctttatacggcaggcaatctcaacaacgacatcggtgtaccgatgacgctgttgcgcttaacgccggaatacgattacgcagttattgaacttggcgcgaaccatcagggcgaaatagcctggactgtgagtctgactcgcccggaagctgcgctggtcaacaacctggcagcggcgcatctggaaggttttggcagccttgcgggtgtcgcgaaagcgaaaggtgaaatctttagcggcctgccggaaaacggtatcgccattatgaacgccgacaacaacgactggctgaactggcagagcgtaattggcagtcgcaaagtgtggcgtttcagtcccaatgccgccaacagcgatttcaccgccaccaatatccatgtgaccagccacggtacggaatttaccctacaaaccccaaccggtagcgtcgatgttctgctgccgttgccggggcgtcacaatattgcgaatgcgctggcagccgctgcgctctccatgtccgtgggcgcaacgcttgatgctatcaaagcggggctggcaaatctgaaagctgttccaggccgtctgttccccatccaactggcagaaaaccagttgctgctcgacgactcctacaacgccaatgtcggtagtatgactgcagcagtccaggtactggctgaaatgccgggctaccgcgtgctggtggtgggcgatatggcggaactgggcgctgaaagcgaagcctgccatgtacaggtgggcgaggcggcaaaagctgctggtattgaccgcgtgttaagcgtgggtaaacaaagccatgctatcagcaccgccagcggcgttggcgaacattttgctgataaaactgcgttaattacgcgtcttaaattactgattgctgagcaacaggtaattacgattttagttaagggtagtcgtagtgccgccatggaagaggtagtacgcgctttacaggagaatgggacatgttaatataagctttacaggagaatgggacatgttagtttggctggccgaacatttggtcaaatattattccggctttaacgtcttttcctatctgacgtttcgcgccatcgtcagcctgctgaccgcgctgttcatcagtttgtggatgggcccgcgtatgattgctcatttgcaaaaactttcctttggtcaggtggtgcgtaacgacggtcctgaaagtcacttcagcaagcgcggtacgccgaccatgggcgggattatgatcctgacggcgattgtgatctccgtactgctgtgggcttacccgtccaatccgtacgtctggtgcgtgttggtggtgctggtaggttacggtgttattggctttgttgatgattatcgcaaagtggtgcgtaaagacaccaaagggttgatcgctcgttggaagtatttctggatgagcgtcattgcgctgggtgtcgccttcgccctgtaccttgccggcaaagacacgcccgcaacgcagctggtggtcccattctttaaagatgtgatgccgcagctggggctgttctacattctgctggcttacttcgtcattgtgggtactggcaacgcggtaaacctgaccgatggtctcgacggcctggcaattatgccgaccgtatttgtcgccggtggttttgcgctggtggcgtgggcgaccggcaatatgaactttgccagctacttgcatataccgtatctgcgacacgccggggaactggttattgtctgtaccgcgatagtcggggcaggactgggcttcctgtggtttaacacctatccggcgcaggtctttatgggcgatgtaggtagcctggcgttaggtggtgcgttaggcattatcgccgtactgctacgtcaggaattcctgctggtgattatggggggcgtgttcgtggtagaaacgctttctgtcatcctgcaggtcggctcctttaaactgcgcggacaacgtattttccgcatggcaccgattcatcaccactatgaactgaaaggctggccggaaccgcgcgtcattgtgcgtttctggattattagcctgatgctggttctgattggtctggcaacgctgaaggtacgttaatcatggctgattatcagggtaaaaatgtcgtcattatcggcctgggcctcaccgggctttcctgcgtggactttttcctcgctcgcggtgtgacgccgcgcgttatggatacgcgtatgacaccgcctggcctggataaattacccgaagccgtagaacgccacacgggcagtctgaatgatgaatggctgatggcggcagatctgattgtcgccagtcccggtattgcactggcgcatccatccttaagcgctgccgctgatgccggaatcgaaatcgttggcgatatcgagctgttctgtcgcgaagcacaagcaccgattgtggcgattaccggttctaacggcaaaagcacggtcaccacgctagtgggtgaaatggcgaaagcggcgggggttaacgttggtgtgggtggcaatattggcctgcctgcgttgatgctactggatgatgagtgtgaactgtacgtgctggaactgagcagcttccagctggaaaccacctccagcttacaggcggtagcagcgaccattctgaacgtgactgaagatcatatggatcgctatccgtttggtttacaacagtatcgtgcagcaaaactgcgcatttacgaaaacgcgaaagtttgcgtggttaatgctgatgatgccttaacaatgccgattcgcggtgcggatgaacgctgcgtcagctttggcgtcaacatgggtgactatcacctgaatcatcagcagggcgaaacctggctgcgggttaaaggcgagaaagtgctgaatgtgaaagagatgaaactttccgggcagcataactacaccaatgcgctggcggcgctggcgctggcagatgctgcagggttaccgcgtgccagcagcctgaaagcgttaaccacattcactggtctgccgcatcgctttgaagttgtgctggagcataacggcgtacgttggattaacgatagcaaagcgaccaacgtcggcagtacggaagcggcgctgaatggcctgcacgtagacggcacactgcatttgttgctgggtggcgatggtaaaagcgcggactttagcccactggcgcgttacctgaatggcgataacgtacgtctgtattgtttcggtcgtgacggcgcgcagctggcggcgctacgtccggaagtggcagaacaaaccgaaactatggaacaggcgatgcgcttgctggctccgcgtgttcagccgggcgatatggttctgctctccccagcctgtgccagccttgatcagttcaagaactttgaacaacgaggcaatgagtttgcccgtctggcgaaggagttaggttgatgcgtttatctctccctcgcctgaaaatgccgcgcctgccaggattcagtatcctggtctggatctccacggcgctaaagggctgggtgatgggcagccgggaaaaagataccgacagcctgatcatgtacgatcgcaccttactgtggctgaccttcggcctcgcggcgattggctttatcatggtgaccagcgcgagtatgcccatagggcaacgcttaaccaacgatccgttcttcttcgcgaagcgtgatggtgtctatctgattttggcgtttattctggcgatcattacgctgcgtctgccgatggagttctggcaacgctacagtgccacgatgctgctcggatctatcatcctgctgatgatcgtcctggtagtgggtagcagcgttaaaggggcaagccgttggatcgatctcggtttgctgcgtatccagcctgcggagctgacaaaactgagcctgttttgctatatcgccaactatctggtgcgtaaaggcgacgaagtacgtaataacctgcgcggcttcctgaaaccgatgggcgtgattctggtgttggcagtgttactgctggcacagccagaccttggtacggtggtggtgttgtttgtgactacgctggcgatgttgttcctggcgggagcgaaattgtggcagttcattgccattatcggtatgggcattagtgcggttgtgttgctgatactcgccgaaccgtaccgtatccgccgtgttaccgcattctggaacccgtgggaagatccctttggcagcggctatcagttaacgcaaagcctgatggcgtttggtcgcggcgaactttgggggcaaggtttaggtaacagcgtacaaaaactggagtatctgccggaagcgcacactgactttattttcgccattatcggcgaagaactggggtatgtcggtgtggtgctggcacttttaatggtattcttcgtcgcttttcgcgcgatgagcattggccgtaaagcattagaaattgaccaccgtttttccggttttctcgcctgttctattggcatctggtttagcttccaggcgctggttaacgtaggcgcggcggcggggatgttaccgaccaaaggtctgacattgccgctgatcagttacggtggtagcagcttactgattatgagcacagccatcatgatgctgttgcgtattgattatgaaacgcgtctggagaaagcgcaggcgtttgtacgaggtagtcgatgagtggtcaaggaaagcgattaatggtgatggcaggcggaaccggtggacatgtattcccgggactggcggttgcgcaccatctaatggctcagggttggcaagttcgctggctggggactgccgaccgtatggaagcggacttagtgccaaaacatggcatcgaaattgatttcattcgtatctctggtctgcgtggaaaaggtataaaagcactgatagctgccccgctgcgtatcttcaacgcctggcgtcaggcgcgggcgattatgaaagcgtacaaacctgacgtggtgctcggtatgggaggctacgtgagtggtccaggtggtctggccgcgtggagcttaggcattccggttgtacttcatgaacaaaacggtattgcgggcttaaccaataaatggctggcgaagattgccaccaaagtgatgcaggcgtttccaggtgctttccctaatgcggaagtagtgggtaacccggtgcgtaccgatgtgttggcgctgccgttgccgcagcaacgtttggctggacgtgaaggtccggttcgtgtgctggtagtgggtggttctcagggcgcacgcattcttaaccagacaatgccgcaggttgctgcgaaactgggtgatagtgtcactatctggcatcagagcggcaaaggtagccaacaatccgttgaacaggcgtatgccgaagcggggcaaccgcagcataaagtgacggaatttattgatgatatggcggcggcgtatgcgtgggcggatgtcgtcgtttgccgctccggtgcgttaacggtgagtgaaatcgccgcggcaggactaccggcgttgtttgtgccgtttcaacataaagaccgccagcaatactggaatgcgctaccgctggaaaaagcgggcgcagccaaaattatcgagcagccacagcttagcgtggatgctgtcgccaacaccctggccgggtggagccgagaaaccttattaaccatggcagaacgcgcccgcgctgcatccattccggatgccaccgagcgagtggcaaatgaagtgagccgggttgcccgggcgtaattgtagcgatgccttttgcatcgtatgaatttaagaagttaatggcgtaaagaatgaatacacaacaattggcaaaactgcgttccatcgtgcccgaaatgcgtcgcgttcggcacatacattttgtcggcattggtggtgccggtatgggcggtattgccgaagttctggccaatgaaggttatcagatcagtggttccgatttagcgccaaatccggtcacgcagcagttaatgaatctgggtgcgacgatttatttcaaccatcgcccggaaaacgtacgtgatgccagcgtggtcgttgtttccagcgcgatttctgccgataacccggaaattgtcgccgctcatgaagcgcgtattccggtgatccgtcgtgccgaaatgctggctgagttaatgcgttttcgtcatggcatcgccattgccggaacgcacggcaaaacgacaaccaccgcgatggtttccagcatctacgcagaagcggggctcgacccaaccttcgttaacggcgggctggtaaaagcggcgggggttcatgcgcgtttggggcatggtcggtacctgattgccgaagcagatgagagtgatgcaagcttcctgcatctgcaaccgatggtggcgattgtcaccaatatcgaagccgaccacatggatacctaccagggcgactttgagaatttaaaacagacttttattaattttctgcacaacctgccgttttacggtcgtgcggtgatgtgtgttgatgatccggtgatccgcgaattgttaccgcgagtggggcgtcagaccacgacttacggcttcagcgaagatgccgacgtgcgtgtagaagattatcagcagattggcccgcaggggcactttacgctgctgcgccaggacaaagagccgatgcgcgtcaccctgaatgcgccaggtcgtcataacgcgctgaacgccgcagctgcggttgcggttgctacggaagagggcattgacgacgaggctattttgcgggcgcttgaaagcttccaggggactggtcgccgttttgatttcctcggtgaattcccgctggagccagtgaatggtaaaagcggtacggcaatgctggtcgatgactacggccaccacccgacggaagtggacgccaccattaaagcggcgcgcgcaggctggccggataaaaacctggtaatgctgtttcagccgcaccgttttacccgtacgcgcgacctgtatgatgatttcgccaatgtgctgacgcaggttgataccctgttgatgctggaagtgtatccggctggcgaagcgccaattccgggagcggacagccgtagcctgtgtcgcacaattcgtggacgtgggaaaattgatcccattctggtgccggatccggcgcgggtagccgagatgctggcaccggtattaaccggtaacgacctgattctcgttcagggggctggtaatattggaaaaattgcccgttctttagctgaaatcaaactgaagccgcaaactccggaggaagaacaacatgactgataaaatcgcggtcctgttgggtgggacctccgctgagcgggaagtttctctgaattctggcgcagcggtgttagccggactgcgtgaaggcggtattgacgcgtatcctgtcgacccgaaagaagtcgacgtgacgcaactgaagagcatgggctttcagaaagtgtttatcgcgctacacggtcgcggcggtgaagatggtacgctgcaggggatgctcgagctgatgggcttgccttataccggaagcggagtgatggcatctgcgcttagtatggataaactacgcagcaaacttctatggcaaggtgccggtttaccggtcgcgccgtgggtagcgttaacccgcgcagagtttgaaaaaggcctgagcgataagcagttagcagaaatttctgctctgggtttgccggttatcgttaagccgagccgcgaaggttccagtgtgggaatgagtaaagtagtagcagaaaatgctctacaagatgcattaagattggcatttcagcacgatgaagaagtattgattgaaaaatggctaagtgggccggagttcacggttgcgatactcggtgaagaaattttaccgagtatacgtattcaaccgtccggaaccttctatgattatgaggcgaagtatctctctgatgagacacagtatttctgccccgcaggtctggaagcgagtcaagaggccaatttgcaggcattagtgctgaaagcatggacgacgttaggttgcaaaggatggggacgtattgacgttatgctggacagcgatggacagttttatctgctggaagccaataccagtccgggtatgaccagccacagcctggtgccgatggcggcacgtcaggcaggtatgagcttcagccagttggtagtacgaattctggaactggcggactaatatgagccaggctgctctgaacacgcgaaacagcgaagaagaggtttcttctcgccgcaataatggaacgcgtctggcggggatccttttcctgctgaccgttttaacgacagtgttggtgagcggctgggtcgtgttgggctggatggaagatgcgcaacgcctgccgctcagtaagctggtgttgaccggtgaacgccattacacacgtaatgacgatatccggcagagcatcctggcattgggtgagccgggtacctttatgacccaggatgtcaacatcatccagacgcaaatagaacaacgcctgccgtggattaagcaggtgagcgtcagaaagcagtggcctgatgaattgaagattcatctggttgaatatgtgccgattgcgcggtggaatgatcaacatatggtagacgcggaaggaaataccttcagcgtgccgccagaacgcaccagcaagcaggtgcttccaatgctgtatggcccggaaggcagcgccaatgaagtgttgcagggctatcgcgaaatggggcagatgctggcaaaggacagatttactctgaaggaagcggcgatgaccgcgcggcgttcctggcagttgacgctgaataacgatattaagctcaatcttggccggggcgatacgatgaaacgtttggctcgctttgtagaactttatccggttttacagcagcaggcgcaaaccgatggcaaacggattagctacgttgatttgcgttatgactctggagcggcagtaggctgggcgcccttgccgccagaggaatctactcagcaacaaaatcaggcacaggcagaacaacaatgatcaaggcgacggacagaaaactggtagtaggactggagattggtaccgcgaaggttgccgctttagtaggggaagttctgcccgacggtatggtcaatatcattggcgtgggcagctgcccgagccgtggtatggataaaggcggggtgaacgacctcgaatccgtggtcaagtgcgtacaacgcgccattgaccaggcagaattgatggcagattgtcagatctctagcgtatatctggcgctttctggtaagcacatcagctgccagaatgaaattggtatggtgcctatttctgaagaagaagtgacgcaagaagatgtggaaaacgtcgtccataccgcgaaaagcgtgcgtgtgcgcgatgagcatcgtgtgctgcatgtgatcccgcaagagtatgcgattgactatcaggaagggatcaagaatccggtaggacttagcggcgtgcggatgcaggcaaaagtgcacctgatcacatgtcacaacgatatggcgaaaaacatcgtcaaagcggttgaacgttgtgggctgaaagttgaccaactgatatttgccggactggcaagtagttatagcgtattgacggaagatgaacgtgaactgggtgtctgcgtcgtcgatatcggtggtggtacaatggatatcgccgtttataccggtggggcattgcgccacactaaggtaattccttatgctggcaatgtcgtgaccagtgatatcgcttacgcctttggcacgccgccaagcgacgccgaagcgattaaagttcgccacggttgtgcgctgggttccatcgttggaaaagatgagagcgtggaagtgccgagcgtaggtggtcgtccgccacggagtctgcaacgtcagacactggcagaggtgatcgagccgcgctataccgagctgctcaacctggtcaacgaagagatattgcagttgcaggaaaagcttcgccaacaaggggttaaacatcacctggcggcaggcattgtattaaccggtggcgcagcgcagatcgaaggtcttgcagcctgtgctcagcgcgtgtttcatacgcaagtgcgtatcggcgcgccgctgaacattaccggtttaacggattatgctcaggagccgtattatagcacggcggtgggattgcttcactatgggaaagagagtcatcttaacggtgaagctgaagtagaaaaacgtgttacagcaagtgttggcagctggatcaagcgactcaatagttggctgcgaaaagagttttaatttttatgaggccgacgatgattacggcctcaggcgacaggcacaaatcggagagaaactatgtttgaaccaatggaacttaccaatgacgcggtgattaaagtcatcggcgtcggcggcggcggcggtaatgctgttgaacacatggtgcgcgagcgcattgaaggtgttgaattcttcgcggtaaataccgatgcacaagcgctgcgtaaaacagcggttggacagacgattcaaatcggtagcggtatcaccaaaggactgggcgctggcgctaatccagaagttggccgcaatgcggctgatgaggatcgcgatgcattgcgtgcggcgctggaaggtgcagacatggtctttattgctgcgggtatgggtggtggtaccggtacaggtgcagcaccagtcgtcgctgaagtggcaaaagatttgggtatcctgaccgttgctgtcgtcactaagcctttcaactttgaaggcaagaagcgtatggcattcgcggagcaggggatcactgaactgtccaagcatgtggactctctgatcactatcccgaacgacaaactgctgaaagttctgggccgcggtatctccctgctggatgcgtttggcgcagcgaacgatgtactgaaaggcgctgtgcaaggtatcgctgaactgattactcgtccgggtttgatgaacgtggactttgcagacgtacgcaccgtaatgtctgagatgggctacgcaatgatgggttctggcgtggcgagcggtgaagaccgtgcggaagaagctgctgaaatggctatctcttctccgctgctggaagatatcgacctgtctggcgcgcgcggcgtgctggttaacatcacggcgggcttcgacctgcgtctggatgagttcgaaacggtaggtaacaccatccgtgcatttgcttccgacaacgcgactgtggttatcggtacttctcttgacccggatatgaatgacgagctgcgcgtaaccgttgttgcgacaggtatcggcatggacaaacgtcctgaaatcactctggtgaccaataagcaggttcagcagccagtgatggatcgctaccagcagcatgggatggctccgctgacccaggagcagaagccggttgctaaagtcgtgaatgacaatgcgccgcaaactgcgaaagagccggattatctggatatcccagcattcctgcgtaagcaagctgattaagaattgactggaatttgggtttcgaggctctttgtgctaaactggcccgccgaatgtatagtacacttcggttggataggtaatttggcgagataatacgatgatcaaacaaaggacacttaaacgtatcgttcaggcgacgggtgtcggtttacataccggcaagaaagtcaccctgacgttacgccctgcgccggccaacaccggggtcatctatcgtcgcaccgacttgaatccaccggtagatttcccggccgatgccaaatctgtgcgtgataccatgctctgtacgtgtctggtcaacgagcatgatgtacggattagtaccgtagagcacctcaatgctgctctcgcgggcttgggcatcgataacattgttatcgaagttaacgcgccggaaatcccgatcatggacggcagcgccgctccgtttgtatacctgctgcttgacgccggtatcgacgagttgaactgcgccaaaaaatttgttcgcatcaaagagactgttcgtgtcgaagatggcgataagtgggctgaatttaagccgtacaatggttttagcctggatttcaccatcgattttaaccatccggctattgattccagcaaccagcgctatgcgatgaacttctccgctgatgcgtttatgcgccagatcagccgtgcgcgtacgttcggtttcatgcgtgatatcgaatatctgcagtcccgtggtttgtgcctgggcggcagcttcgattgtgccatcgttgttgacgattatcgcgtactgaacgaagacggcctgcgttttgaagacgaatttgtgcgtcacaaaatgctcgatgcgatcggtgacttgttcatgtgtggtcacaatattattggtgcatttaccgcttataaatccggtcatgcactgaataacaaactgctgcaggctgtcctggcgaaacaggaagcctgggaatatgtgaccttccaggacgacgcagaactgccgttggccttcaaagcgcctagtgctgtactggcataacgacatttatactgtcgtataaaattcgactggcaaatctggcactctctccggccaggtgaaccagtcgtttttttttgaattttataagagctataaaaaacggtgcgaacgctgttttcttaagcacttttccgcacaacttatcttcattcgtgctgtggactgcaggctttaatgataagatttgtgcgctaaatacgtttgaatatgatcgggatggcaataacgtgagtggaatactgacgcgctggcgacagtttggtaaacgctacttctggccgcatctcttattagggatggttgcggcgagtttaggtttgcctgcgctcagcaacgccgccgaaccaaacgcgcccgcaaaagcgacaacccgcaaccacgagcctagtgccaaagttaactttggtcaattggccttgctggaagcgaacacacgccgcccgaatagcaactattccgttgattactggcatcaacatgccattcgcacggtaatccgtcatctttctttcgcaatggcaccgcaaacactgcccgttgctgaagaatctttgcctcttcaggcgcaacatcttgcattactggatacgctcagcgcgctgctgacccaggaaggcacgccgtctgaaaagggttatcgcattgattatgcgcattttaccccacaagcaaaattcagcacgcccgtctggataagccaggcgcaaggcatccgtgctggccctcaacgcctcacctaacaacaataaacctttacttcattttattaactccgcaacgcggggcgtttgagattttattatgctaatcaaattgttaactaaagttttcggtagtcgtaacgatcgcaccctgcgccggatgcgcaaagtggtcaacatcatcaatgccatggaaccggagatggaaaaactctccgacgaagaactgaaagggaaaaccgcagagtttcgtgcacgtctggaaaaaggcgaagtgctggaaaatctgatcccggaagctttcgccgtggtacgtgaggcaagtaagcgcgtctttggtatgcgtcacttcgacgttcagttactcggcggtatggttcttaacgaacgctgcatcgccgaaatgcgtaccggtgaaggaaaaaccctgaccgcaacgctgcctgcttacctgaacgcactaaccggtaaaggcgtgcacgtagttaccgtcaacgactacctggcgcaacgtgacgccgaaaacaaccgtccgctgtttgaattccttggcctgactgtcggtatcaacctgccgggcatgccagcaccggcaaagcgcgaagcttacgcagctgacatcacttacggtacgaacaacgaatacggctttgactacctgcgcgacaacatggcgttcagccctgaagaacgtgtacagcgtaaactgcactatgcgctggtggacgaagtggactccatcctgatcgatgaagcgcgtacaccgctgatcatttccggcccggcagaagacagcagcgaaatgtataaacgcgtgaataaaattattccgcacctgatccgtcaggaaaaagaagactccgaaaccttccagggcgaaggccacttcagcgtggacgaaaaatctcgccaggtgaacctgaccgaacgtggtctggtgctgattgaagaactgctggtgaaagagggcatcatggatgaaggggagtctctgtactctccggccaacatcatgctgatgcaccacgtaacggcggcgctgcgcgctcatgcgctgtttacccgtgacgtcgactacatcgttaaagatggtgaagttatcatcgttgacgaacacaccggtcgtaccatgcagggccgtcgctggtccgatggtctgcaccaggctgtggaagcgaaagaaggtgtgcagatccagaacgaaaaccaaacgctggctagcatcaccttccagaactacttccgtctgtatgaaaaactggcggggatgaccggtactgctgataccgaagctttcgaatttagcagtatctacaagctggataccgtcgttgttccgaccaaccgtccaatgattcgtaaagatctgccggacctggtctacatgactgaagcggaaaaaattcaggcgatcattgaagatatcaaagaacgtactgcgaaaggccagccggtgctggtgggtactatctccatcgaaaaaagcgagctggtgagtaacgaactgaccaaagccggtattaagcacaacgtcctgaacgccaaattccacgccaacgaagcggcgattgttgctcaggcaggttatccggctgcggtgactatcgcgaccaatatggcgggtcgtggtacagatattgtgctcggtggtagctggcaggcagaagttgccgcgctggaaaatccgaccgcagagcaaattgaaaaaattaaagccgactggcaggtacgtcacgatgcggtactggaagcaggtggcctgcatatcatcggtaccgagcgtcacgaatcccgtcgtatcgataaccagttgcgcggtcgttctggtcgtcagggggatgctggttcttcccgtttctacctgagcatggaagatgcgctgatgcgtatttttgcttccgaccgagtatccggcatgatgcgtaaactgggtatgaagccaggcgaagccattgaacacccgtgggtgactaaagcgattgccaacgcccagcgtaaagttgaaagccgtaacttcgacattcgtaagcaactgctggaatatgatgacgtggctaacgatcagcgtcgcgccatttactcccagcgtaacgaactgttggatgtcagcgatgtgagcgaaaccattaacagcattcgtgaagatgtgttcaaagcgaccattgatgcctacattccaccacagagcctggaagaaatgtgggatattccggggctgcaggaacgtctgaagaacgatttcgacctcgatttgccaattgccgagtggctggataaagaaccagaactgcatgaagagacgctgcgtgagcgcattctggcgcagtccatcgaagtgtatcagcgtaaagaagaagtggttggtgctgagatgatgcgtcacttcgagaaaggcgtcatgctgcaaacgcttgactccctgtggaaagagcacctggcagcgatggactatctgcgtcagggtatccacctgcgtggctacgcacagaaagatccgaagcaggaatacaaacgtgaaagcttctccatgtttgcagcgatgctggagagcttgaaatatgaagttatcagtacgctgagcaaagttcaggtacgtatgcctgaagaggttgaggagctggaacaacagcgtcgtatggaagccgagcgtttagcgcaaatgcagcagcttagccatcaggatgacgactctgcagccgcagctgcactggcggcgcaaaccggagagcgcaaagtaggacgtaacgatccttgcccgtgcggttctggtaaaaaatacaagcagtgccatggccgcctgcaataaaagctaactgttgaagtaaaaggcgcaggattctgcgccttttttataggtttaagacaatgaaaaagctgcaaattgcggtaggtattattcgcaacgagaacaatgaaatctttataacgcgtcgcgcagcagatgcgcacatggcgaataaactggagtttcccggcggtaaaattgaaatgggtgaaacgccggaacaggcggtggtgcgtgaacttcaggaagaagtcgggattaccccccaacattttagcctatttgaaaaactggaatatgaattcccggacaggcatataacactgtggttttggctggtcgaacgctgggaaggggagccgtggggtaaagaagggcaacccggtgagtggatgagcctggtcggtcttaatgccgatgattttccgccagccaatgaaccggtaattgcgaagcttaaacgtctgtaagtcagataaggcgttttcgccgcatccgacattcgcacacgatgcctgatgcgacgctggcgcgtcttatcaggcctaaagggatttctaactcattgataaatttgtttttgtaggtcggataaggcgttcacgccgcatccgacatttgcacaagatgcctgatgcgacgctgtccgcgtcttatcaggcctacgtgcggcatcagacaaatgtcactgctttggttcttcgctccagtcatcgctttcggaaagatcgccactgctggggattcgtttttcttcagcagcccattctccgaggtcgatcagctgacaacgtttggagcaaaatggccgaaacgggctgatttcaccccacaccaccgttttcccgcaggttgggcaattcaccgtaatagtttcactcatttttactccttagcaacaggccagttcgaaatccagacgttccggtacctgtccgttttcagtgtccagcggcataaaacgaatggcaaaacggctcttatgtccggaaatttgcggataaagctgactatcgaggctcagattcaggcgcagcaagtcggcatcgccaccgttatcctgataaaaaccattcaggctggtttgtttacggaagggggcgctctggcgaattaaatccagcaccatggtaagtgcctgggtgagcgggttcaggctggcaatccaggtttctacctggctgtcgcgctgcgcctggggtagatgcagccaaatgtgcaatgtaggtaaatcaaagctgcaacagccgcctgggatgctcagtcgctgacgcaccagagcaatcaaacgatcttcacgcagaaattgcccgatacgcggcgcggaaattaatacgctccccgccgcttttaactgctgaattaatgcttcaatacggctctggtccacgccaggcacgccaatccaggtctggagtttacgttgctgccggtcaagttctttcaacagctcagtgcggacttcgccgcgctcgaaaacatccagtaattcactgacattacggaagaaatgcagcgcgccagcgtggtcaacgatgggtaaattaacggtgagttgctgaatcaaaaactcaatgcgcagccatgtacgcattttttcatttagtggatgttcaaaaaggacctgggtctgcattacggtttttcctgactgacaaactggctcgcaagctgcaaatagtgtgcgtgcaggcgggcaacatcgcttgcgatagcatccggtgcgccgttattatcaatgacgtcatctgccacggcaaggcgggcttcgcgcgttgcctgagcagcaaggatttgttcgacatgctcgcgagttacatcatcgcgctgcatggtgcgcttaagttgcgtttctgggctgacatccaccacaagcactcgattcgcttttttatacagactgttttctaccagcaatggcacaacccacagtacatagggggaagtagcttgctggatctggtgttgcgtctcttgctgaatcagcggatgcagcagggcgttaagccagtttttctcttccgggttggcgaagatccgctcgcgcaaggcccggcgctgcaatgttccatcagcagcaatcatgttagcgccaaagtgatcagcaatggcatgtagcgcaggtgcacctggttcaaccacctgacgcgcaataatatcggcatcaatgacgttaattccgagatcagcaaacgcattggcaacggtactcttgccactgccaatgcctcccgttaaggcaactatatacctcataatttatattcccgggaattcatcatgattatcaaaacgttaaaaatgagtgcacgaaagcgaaattgatgaaacgttcgctcactatttaccaggtaaatttatgggattgtagcgtaaaaaaagacaatttcgcagtcttgcgccgcattgattagtgcgtatgatagcgtcactggagttgcgctcttacccttatagccattaaccccaggaatccgcacatgcgtattgaagaagatctgaagttaggttttaaagacgttctcatccgccctaaacgctccactcttaaaagccgttccgatgttgaactggaacgtcaattcaccttcaaacatagtggtcagagctggtccggcgtgccgattatcgccgcaaatatggacaccgtaggcacattttctatggcctctgcgctggcttcttttgatattttgactgctgtgcataaacactattctgtcgaagagtggcaagcgtttatcaacaattcttccgctgatgtgctgaaacatgtgatggtttctaccggtacgtctgatgcggatttcgaaaaaactaaacagattctcgacctgaacccggcattaaacttcgtttgtattgacgtggcgaatggttattccgaacacttcgtgcagttcgttgcgaaagcgcgtgaagcgtggccgaccaaaaccatttgtgctggtaacgtagtgactggtgaaatgtgtgaggagcttatcctcagtggtgccgatatcgttaaagttggcattggcccaggttctgtttgtacaactcgcgtcaaaacaggcgtcggttatccgcaactttctgcggtaatcgaatgtgccgatgctgcgcacggtctgggcggaatgatcgtcagcgatggtggctgcaccacgccgggcgatgtggcgaaagcctttggcggcggtgccgatttcgtcatgcttggcggcatgctggcgggccacgaagagagcggcggtcgcatcgttgaggagaacggcgagaaatttatgctgttctacggcatgagctccgagtctgcgatgaaacgtcacgttggcggcgttgcggaatatcgcgcagcagaaggtaaaaccgttaagctgccgctgcgaggcccggttgaaaataccgcgcgagatattttgggcggcctgcgtagtgcttgtacatacgttggggctagtcgcctgaaagagctgaccaagcgcaccacgtttattcgtgtgcaggaacaagaaaaccgcatcttcaacaacctgtaatctcccaacgctggcgtggagcaacacgccagcgttatcccatcccactcatcgcatcgcctaaatggaaaattggcagatacattgccaccaccagcgtaccaataattcctcccgttatgatcagcaacgccggttccagtaaggctgcgaggttatccgccagcgccattgtgttttcccgatgatgatgggcgaggttgtctaacatgagatccagagagccggatgcctctcctgttctcactaattgcaaacagagcgggctaaactcaccggtattttttagcgccagccagatgggttgaccgttactgatatcgtgctggatttgtgtcagaagttgcacccagtacgggcagcgcattgtttctctgacgctctctacgccctgtaaaaaagtaatgcctgcactttgtgtcagcgccagaatcgtaaagatctgcgtgagtttttgtccccgcatcagactacccataatcgggatgcgtaacagcaatttctgccgcactataagccaggtcggtcggcgcatcagcaacttattggctatcgccagcagaaagccgaacaacaccagcagccagctccattcgccactaaagtctgccagcgtcatgatcccctgcgttagtgccggtagtggggtgttgaaggtcttatagatagcggcaaactccggcagaacaaaatgcagcattgccacaaccaccatgattgccatcgctaaaatgatgatgggataacgtaacgcacttttcactttgtcggtcaactgacgctgggctttttgctgacgcgccagttcaaagcagcattcatccagcttaccggtcagttcacccgtgcggatcatcgcctgatagagcggcggaaatacctcactccagggtaataaggcattggaaaaagcaatgccctgttcgagatcgtgcgccaggctttgcagcaacgcttgccattgcttactgggatgctgttccgccagcagagccagcccttcagaaagcgttaaccctgctttgagtagcgtcgccagttgatgaatgacttccgcgcttttatctcctcgccactgcgcagaattgatggcgattcgcttcaggcttagtggggtaaccatctgttgctgtagtgccataagcagtaaagtacggctctctgcccatagcatcccatcttgcgcattgccgtcgccggttatgccatgccagcgccagagttgcttactcgccatgcggcatccccagtacgcggattaactcttcaaaggtggttaagccttgctctacggccaggcagccgttttcaaaaagcgtacgcatacccgcctgtcgtgcgtgcgtttccaggctttcaacgtcggtattagcggaaataagctgacgaatgaccggcgttatgggcagaacttcaaataaggccgtacgaccataaaaaccgtggtagcaatgtacacaaccgggtgcctgccagtggggcagcgggcttggccatacattgtctggaatgtggatgggctccccttgctgccggcgacaatgtgggcaaagtttgcgtaccagacgctgggctattaccagcgtaagcgcgctacttagcatccagcgggcgacccccatttgctgtaaacgtaccagcgtttcgcaggtggaattagtgtgtagggtagacaacaccaggtgaccagtttgcgccgctttaatagcgatctctgctgtttcgccatcgcggatctctccgatcatgatgacgtcaggatcctggcgcaataacgcacgcaaaacgccctgaaaggtgagtccggcacgcggatggatttgcgtctggtttagtccggctatggggatctcaactggatcttcgacgctacaaatattaatgtcagcggtattcagcttttgcagggcactataaagcgtgaccgttttgccgctgccggtagggccagttaccagcaccagtccctgtggttgttgcaaggcatgagcaaagtccgccagttgtaacggctgcattccaagcgtgttgacatccagtgcctgacccacctgctgtaacaaccttaataccaccttttcaccaccccgacatggtaaggtcgcaatacgaaaactgacggcgtttcctgccagttcgacagtgaattgcccgtcctgcggcaggcgatgttccgcaatatccaggtttcccagcacttttaatctggcggttaatgcgactccggcatccggactaacatccggtaaaggatgcaatacgccgtcgatacgcaagcggatgcggtaggcattgtccgctggttcgatatgaatatcagacgcgcgttgttccagcgcagattgtaacgttcgagttagcaactctgctttgggctgatgcttctcctgaacagctacgggcagtgtctgttgtgtgcgactggcgtgaccttccatttgttggcgcgtccagcaggtgatctcaatacgtttggtggtagcgaaatgcaatgcgtccagtagctcatggctaggtgcatcgactaccgcaacatgaaccacctcttcgctggcatccagcaagactccatgataacgcagacacagggcagtgagctgtggaatattcattgccgctccttagttggcgtcatcaaagcggaagacatcttcgcaggcttgctgcaatgcgctgtcactttgaatattgcagttgcgcgtccagccggtgacgccgtttgcgttatcccaacccggtgtcatgacgacgcttagcccattgagactttcttgcccggtcaggctcaccacgccctttgccacactcatggcactaacatagcgggtggtggtagggctgggaatgccattgctgccaccgtcgcaggtatctaatccaccatgttccagcgcgcacaactctacggcggtacggtaaggcacaaaggtttgtagcatgtcggtgagtgcggctttgcgcaggtagttttgataagcgggaataccaatggcgcttaaaatggcaatgatgccaataaccaccatcagttcgataagtgtaaaaccgcgttgcttgtccatctgtttcgctccttgatttggttggcgctactttggcaaacgccatcagcacaggcgaggggcaaaaaacgaaacgggaaagcagattccgaggttttttatttcgttgcagcgaaagacaagaaatttgcgaggcgttacgaagaaagttggggaaggggagattatccgcccgcgatggagcggataaatctgtcaactattagcgaaaacgcatactaaggtcgagtgcttgtacgtgtttagttagcgcaccgacggagataaagtccacgcccgtttcggcaaattcacgcagtgttttgtcagtgacgttgccagacacttccagtagcgccttgccgttggtgcgtttgacggcttcgcgcatctgttctgtttcgaagttatccagcatgatgatatcggctcctgctttcagggcttcatcaagttcttccagattctctacttcgacttctactggcgcatccgggtgcagccaggacgctttttcgaccgcctggcgcacactgccggaggcaataatatggttttctttgatcaggaaggcatcagaaagccccagacggtgattcgctccgccgccgcaaagtaccgcgtatttcagagcactacgcaggccgggtaaggttttgcgcgtatccaacaactgcgtgttggtgccttccagcaattcgacatagtggcgtaccttactggcaactccactaagggtttgcacaaaattaagcgcagtgcgttcgcccgttaacagcacgcgggatgggccttcaagttcgaacaaggattgattggcattgatgacatcgccgtcatccacatgccagattatggtgacatcgtcgcctgccagttgaataaacacctcttcaacccagcgtttgccgcaaaagacgccattctcgcgggtgatcaccgtggcatgagagcgagaattttccggtaaaagttttgccgtaatatcattgttggcatcgactgttccgcctaaatcttcccgcagcgcctgggccaccgcgccggggatatcgagattaatgcgttccagcagctcgtcacgtcgggtgtcagggttatagcggcgaggcggcatgttaaaactccagatagctaacgaatcataaggtagaaacatgctactctgaaccgggtattagcaccacatataaggagatcctgcatgttgttagaacaggggtggctggttggcgcgcgccgcgttcccagtccacattacgattgccgcccggatgacgaaacacccaccctgctggtggtgcacaatattagcctgccgccaggcgagtttggcggtccgtggatcgacgcattattcactggaactattgatccgcaggcacatcctttctttgctgagatcgcccatttgcgcgtctccgctcactgtttgattcgccgtgatggtgaaatagtccagtatgttcctttcgataaacgtgcatggcatgcgggagcctctcagtatcaggggcgcgaacgctgcaatgatttttctattgggattgagcttgaaggcaccgatacgctggcgtataccgatgcgcagtatcaacagcttgcggcggttacgcgggcactgattgattgctatccggatatcgctaaaaacatgacgggccattgtgatattgcgccggatcggaaaaccgatcccggtcctgcatttgattgggcacggtttcgtgtgctggtcagcaaggagacaacatgacgctatttacaaccttactggtgttaattttcgagcgcctgtttaagttgggcgagcactggcagcttgatcatcgtcttgaagcgttctttcggcgggtgaaacatttttctctcgggcgcacgttaggcatgaccattattgcgatgggcgtgacttttttactgttacgcgcattgcagggagtattgttcaacgttcccacgctactggtgtggctgctgattggtttgctgtgtattggcgcaggtaaagttcgtcttcattatcatgcttatctgacagctgctagtcgtaatgatagccatgcccgtgccacgatggctggcgaactcaccatgattcacggcgtcccggcaggctgcgacgaacgtgagtatttgcgtgagctgcaaaatgcattgctgtggattaactttcgtttttatcttgcaccgctgttctggctgattgtggggggaacctggggacccgttacgctgatggggtatgcgtttttgcgtgcatggcaatactggctggcgcgatatcagacgccgcatcatcgtttacagtccggcattgatgccgtgcttcatgtactggattgggtgccggttcgtcttgcgggtgtggtatatgccttgatcggtcatggtgagaaagcgttaccggcctggtttgctagcctgggtgatttccatactagccagtatcaggtgttaacgcgtctggcgcagttctctctggcgcgtgaaccgcatgtcgataaggtggagacgccgaaggcagcggttagtatggcgaagaaaaccagcttcgtggtcgtggtggtgattgcactactgacgatttacggggcgttggtgtaaagattattgccctcaccctgtacgggtgagggcgtagagagattaatgcgcttttacggctttggcggttttctctttaaacagatagccgatacctaacacgatcagccataccgggatcaggtatacgctaatcgccattcctggggtcatcagcataatcaccagtaccgccgccataaacagcaggcagatccagttacccagcggataaagcagagcagggaagcgagttaccacgccttgttcctgcttggcgcgacggaatttcatatgcgccaggctaatcatcgcccagttgattaccagtgcagataccaccagcgccattaacagtccgaaagcggactctggggcaaggtagttaatcagtacgcacaacgccgttaccagtgcagacaccagaatggtatttactggtacaccacgtttatcgacagacgccagcgcttttggcgcattaccctgttgtgccagaccaaacagcatacggctgttgcaatatacgcagctgttgtacacggagagcgccgcagtcagtaccacgatgttcagcgcattcgccacaaaggtatcgcctaactcgtggaagatcagcacaaacggactggtatcggcggtaacgcgggtccacggcatcagactgagcagaacggctaagctaccaatatagaaaatcaggatgcggtagataacctggttagttgctttcggtatactttgctccgggttatcagcttctgctgcggtgatccccaccagttccagaccaccgaagctgaacatgataatcgccatcatcatcaccagcccggtgaagccgtgcggcaggaaaccaccctgatcccacaggttgctaacggtcgcctgcgggccgccgttgccactgaatagcagccagccgccgaagatgatcatcgctaccaccgcgataactttgataatggcaaaccagaactccatctcgccaaacactttaacgttggtcaggttgatggcgttaatcaccacaaagaatacggcggcagaaacccaggtggggatttccggataccagaactgaatgtatttacccacggcagtcagctcagccatggcaactaaaacgtacagtacccagtagttccagccagaggcgaaaccggcaaaactgccccagtatttataagcaaagtggctaaaggagcctgcgacaggttcttcgaccaccatttcacccagctgacgcatgatcagaaaggcgataaaaccagcaatggcgtaacccaggataatccctggccctgcggactgtattacggaggcgctacccaggaataacccggtccctatcgcgccacccagcgcgataagctgaatatggcggtttttaaggccgcgctttagctgctcgccgtgctgttgaccttccatcatgaaacctcgtgcggtggttgtttttttgatctacgcagtgatgcgtgtgtaagtttgcaattccgtttgttgtattaatttgtttacatcaaagaagtttgaattgttacaaaaagacttccgtcagatcaagaataatggtatgcggcagcgaatgcacccgctttatgcatggttgaagatgagttgcttaaaaagaaaccgtttgtaaagctcagcctcaacccctctcaatatgtagaatgaatttaaattcgttttaattgaattaaaaatcacaaaattggtaagtgaatcggttcaattcggatttttatagtttaataatcgttaaaaaactcctttcctacgtaaagtctacatttgtgcatagttacaactttgaaacgttatatatgtcaagttgttaaaatgtgcacagtttcatgatttcaatcaaaacctgtatggacataaggtgaatactttgttactttagcgtcacagacatgaaattggtaagaccaattgacttcggcaagtggcttaagacaggaactcatggcctacagcaaaatccgccaaccaaaactctccgatgtgattgagcagcaactggagtttttgatcctcgaaggcactctccgcccgggcgaaaaactcccaccggaacgcgaactggcaaaacagtttgacgtctcccgtccctccttgcgtgaggcgattcaacgtctcgaagcgaagggcttgttgcttcgtcgccagggtggcggcacttttgtccagagcagcctatggcaaagcttcagcgatccgctggtggagctgctctccgaccatcctgagagtcagtatgacttgctcgaaacacgacacgccctggaaggtatcgccgcttattacgccgcgctgcgtagtaccgatgaagacaaggaacgcatccgtgaactccaccacgccatagagctggcgcagcagtctggcgatctggacgcggaaagtaacgccgtactccagtatcagattgccgtcaccgaagcggcccacaatgtggttctgcttcatctgctaaggtgtatggagccgatgttggcccagaatgtccgccagaacttcgaattgctctatagccgtcgcgagatgctgccgctggtgagtagtcaccgcacccgcatatttgaagcgattatggccggtaagccggaagaagcgcgcgaagcaagccatcgccatctggcctttatcgaagaaattttgctcgacagaagtcgtgaagagagccgccgtgagcgttctctgcgtcgtctggagcaacgaaagaattaatgatttttctggtaaaaattatccagaagatgttgtaaatcaagcgcatataaaagcgcggcaactaaacgtagaacctgtcttattgagctttccggcgagagttcaatgggacaggttccagaaaactcaacgttattagatagataaggaataacccatgagtgaacgtttcccaaatgacgtggatccgatcgaaactcgcgactggctccaggcgatcgaaagcgtcatccgtgaagaaggtgttgagcgtgctcagtatctgatcgaccaactgcttgctgaagcccgcaaaggcggtgtaaacgtagccgcaggcacaggtatcagcaactacatcaacaccatccccgttgaagaacaaccggagtatccgggtaatctggaactggaacgccgtattcgtagtgctatccgctggaacgccatcatgacggtgctgcgtgcgagcaaaaaagacctcgaactgggcggccatatggcgtccttccagtcttccgcaaccatttatgatgtgtgctttaaccacttcttccgtgcacgcaacgagcaggatggcggcgacctggtttacttccagggccacatctccccgggcgtgtacgctcgtgctttcctggaaggtcgtctgactcaggagcagctggataacttccgtcaggaagttcacggcaatggcctctcttcctatccgcacccgaaactgatgccggaattctggcagttcccgaccgtatctatgggtctgggtccgattggtgctatttaccaggctaaattcctgaaatatctggaacaccgtggcctgaaagatacctctaaacaaaccgtttacgcgttcctcggtgacggtgaaatggacgaaccggaatccaaaggtgcgatcaccatcgctacccgtgaaaaactggataacctggtcttcgttatcaactgtaacctgcagcgtcttgacggcccggtcaccggtaacggcaagatcatcaacgaactggaaggcatcttcgaaggtgctggctggaacgtgatcaaagtgatgtggggtagccgttgggatgaactgctgcgtaaggataccagcggtaaactgatccagctgatgaacgaaaccgttgacggcgactaccagaccttcaaaagcaaagatggtgcgtacgttcgtgaacacttcttcggtaaatatcctgaaaccgcagcactggttgcagactggactgacgagcagatctgggcactgaaccgtggtggtcacgatccgaagaaaatctacgctgcattcaagaaagcgcaggaaaccaaaggcaaagcgacagtaatccttgctcataccattaaaggttacggcatgggcgacgcggctgaaggtaaaaacatcgcgcaccaggttaagaaaatgaacatggacggtgtgcgtcatatccgcgaccgtttcaatgtgccggtgtctgatgcagatatcgaaaaactgccgtacatcaccttcccggaaggttctgaagagcatacctatctgcacgctcagcgtcagaaactgcacggttatctgccaagccgtcagccgaacttcaccgagaagcttgagctgccgagcctgcaagacttcggcgcgctgttggaagagcagagcaaagagatctctaccactatcgctttcgttcgtgctctgaacgtgatgctgaagaacaagagcatcaaagatcgtctggtaccgatcatcgccgacgaagcgcgtactttcggtatggaaggtctgttccgtcagattggtatttacagcccgaacggtcagcagtacaccccgcaggaccgcgagcaggttgcttactataaagaagacgagaaaggtcagattctgcaggaagggatcaacgagctgggcgcaggttgttcctggctggcagcggcgacctcttacagcaccaacaatctgccgatgatcccgttctacatctattacagcatgttcggcttccagcgtattggcgatctgtgctgggcggctggcgaccagcaagcgcgtggcttcctgatcggcggtacttccggtcgtaccaccctgaacggcgaaggtctgcagcacgaagatggtcacagccacattcagagcctgactatcccgaactgtatctcttacgacccggcttacgcttacgaagttgctgtcatcatgcatgacggtctggagcgtatgtacggtgaaaaacaagagaacgtttactactacatcactacgctgaacgaaaactaccacatgccggcaatgccggaaggtgctgaggaaggtatccgtaaaggtatctacaaactcgaaactattgaaggtagcaaaggtaaagttcagctgctcggctccggttctatcctgcgtcacgtccgtgaagcagctgagatcctggcgaaagattacggcgtaggttctgacgtttatagcgtgacctccttcaccgagctggcgcgtgatggtcaggattgtgaacgctggaacatgctgcacccgctggaaactccgcgcgttccgtatatcgctcaggtgatgaacgacgctccggcagtggcatctaccgactatatgaaactgttcgctgagcaggtccgtacttacgtaccggctgacgactaccgcgtactgggtactgatggcttcggtcgttccgacagccgtgagaacctgcgtcaccacttcgaagttgatgcttcttatgtcgtggttgcggcgctgggcgaactggctaaacgtggcgaaatcgataagaaagtggttgctgacgcaatcgccaaattcaacatcgatgcagataaagttaacccgcgtctggcgtaagaggtaaaagaataatggctatcgaaatcaaagtaccggacatcggggctgatgaagttgaaatcaccgagatcctggtcaaagtgggcgacaaagttgaagccgaacagagcctgatcaccgtagaaggcgacaaagcctctatggaagttccgtctccgcaggcgggtatcgttaaagagatcaaagtctctgttggcgataaaacccagaccggcgcactgattatgattttcgattccgccgacggtgcagcagacgctgcacctgctcaggcagaagagaagaaagaagcagctccggcagcagcaccagcggctgcggcggcaaaagacgttaacgttccggatatcggcagcgacgaagttgaagtgaccgaaatcctggtgaaagttggcgataaagttgaagctgaacagagcctgatcaccgtagaaggcgacaaggcttctatggaagttccggctccgtttgctggcaccgtgaaagagatcaaagtgaacgtgggtgacaaagtgtctaccggcagcctgattatggtcttcgaagtcgcgggtgaagcaggcgcggcagctccggccgctaaacaggaagcagctccggcagcggcccctgcaccagcggctggcgtgaaagaagttaacgttccggatatcggcggtgacgaagttgaagtgactgaagtgatggtgaaagtgggcgacaaagttgccgctgaacagagtctgatcaccgtagaaggcgacaaagcttctatggaagttccggcgccgtttgcaggcgtcgtgaaggaactgaaagtcaacgttggcgataaagtgaaaactggcagcctgattatgatcttcgaagttgaaggcgcagcgcctgcggcagctcctgcgaaacaggaagcggcagcgccggcaccggcagcaaaagctgaagccccggcagcagcaccagctgcgaaagcggaaggcaaatctgaatttgctgaaaacgacgcttatgttcacgcgactccgctgatccgccgtctggcacgcgagtttggtgttaaccttgcgaaagtgaagggcactggccgtaaaggtcgtatcctgcgcgaagacgttcaggcttacgtgaaagaagctatcaaacgtgcagaagcagctccggcagcgactggcggtggtatccctggcatgctgccgtggccgaaggtggacttcagcaagtttggtgaaatcgaagaagtggaactgggccgcatccagaaaatctctggtgcgaacctgagccgtaactgggtaatgatcccgcatgttactcacttcgacaaaaccgatatcaccgagttggaagcgttccgtaaacagcagaacgaagaagcggcgaaacgtaagctggatgtgaagatcaccccggttgtcttcatcatgaaagccgttgctgcagctcttgagcagatgcctcgcttcaatagtagcctgagcgaagacggtcagcgtctgaccctgaagaaatacatcaacatcggtgtggcggtggataccccgaacggtctggttgttccggtattcaaagacgtcaacaagaaaggcatcatcgagctgtctcgcgagctgatgactatttctaagaaagcgcgtgacggtaagctgactgcgggcgaaatgcagggcggttgcttcaccatctccagcatcggcggcctgggtactacccacttcgcgccgattgtgaacgcgccggaagtggctatcctcggcgtttccaagtccgcgatggagccggtgtggaatggtaaagagttcgtgccgcgtctgatgctgccgatttctctctccttcgaccaccgcgtgatcgacggtgctgatggtgcccgtttcattaccatcattaacaacacgctgtctgacattcgccgtctggtgatgtaagtaaaagagccggcccaacggccggcttttttctggtaatctcatgaatgtattgaggttattagcgaatagacaaatcggttgccgtttgttgtttaaaaattgttaacaattttgtaaaataccgacggatagaacgacccggtggtggttagggtattacttcacataccctatggatttctgggtgcagcaaggtagcaagcgccagaatccccaggagcttacataagtaagtgactggggtgagggcgtgaagctaacgccgctgcggcctgaaagacgacgggtatgaccgccggagataaatatatagaggtcatgatgagtactgaaatcaaaactcaggtcgtggtacttggggcaggccccgcaggttactccgctgccttccgttgcgctgatttaggtctggaaaccgtaatcgtagaacgttacaacacccttggcggtgtttgcctgaacgtcggctgtatcccttctaaagcactgctgcacgtagcaaaagttatcgaagaagccaaagcgctggctgaacacggtatcgtcttcggcgaaccgaaaaccgatatcgacaagattcgtacctggaaagagaaagtgatcaatcagctgaccggtggtctggctggtatggcgaaaggccgcaaagtcaaagtggtcaacggtctgggtaaattcaccggggctaacaccctggaagttgaaggtgagaacggcaaaaccgtgatcaacttcgacaacgcgatcattgcagcgggttctcgcccgatccaactgccgtttattccgcatgaagatccgcgtatctgggactccactgacgcgctggaactgaaagaagtaccagaacgcctgctggtaatgggtggcggtatcatcggtctggaaatgggcaccgtttaccacgcgctgggtagtcagattgacgtggttgaaatgttcgaccaggttatcccggcagctgacaaagacatcgttaaagtcttcaccaagcgtatcagcaagaaattcaacctgatgctggaaaccaaagttaccgccgttgaagcgaaagaagacggcatttatgtgacgatggaaggcaaaaaagcacccgctgaaccgcagcgttacgacgccgtgctggtagcgattggtcgtgtgccgaacggtaaaaacctcgacgcaggcaaagcaggcgtggaagttgacgaccgtggtttcatccgcgttgacaaacagctgcgtaccaacgtaccgcacatctttgctatcggcgatatcgtcggtcaaccgatgctggcacacaaaggtgttcacgaaggtcacgttgccgctgaagttatcgccggtaagaaacactacttcgatccgaaagttatcccgtccatcgcctataccgaaccagaagttgcatgggtgggtctgactgagaaagaagcgaaagagaaaggcatcagctatgaaaccgccaccttcccgtgggctgcttctggtcgtgctatcgcttccgactgcgcagacggtatgaccaagctgattttcgacaaagaatctcaccgtgtgatcggtggtgcgattgtcggtactaacggcggcgagctgctgggtgaaatcggcctggcaatcgaaatgggttgtgatgctgaagacatcgcactgaccatccacgcgcacccgactctgcacgagtctgtgggcctggcggcagaagtgttcgaaggtagcattaccgacctgccgaacccgaaagcgaagaagaagtaatttttcgtttgccggaacatccggcaattaaaaaagcggctaaccacgccgctttttttacgtctgcaatttacctttccagtcttcttgctccacgttcagagagacgttcgcatactgcactccgttgctcgttattcagcctgacagtatggttactgtcgtttagacgttgtgggcggctctcctgaactttctcccgaaaaacctgacgttgttcaggacttgcgctttgaacacgctggcgggcgttatcacgttgctgttgattcagtgggcgctgctgtactttttccttaaacacctggcgctgctctggacttgcggactgaatacgctcacgcgctgcgtctcttcgctgctggttctgcgggttagtctgcattttctcgcgaaccgcctggcgctgctcagggctggcggactgaatgcgctcacgcgctgcctctcttcgctgctggatcttcgggttagtctgcattctctcgcgaactgcctggcgctgctcagggctggcggactgataacgctgacgagcggcgtccttttgttgctgggtcagtggttggcgacggctgaagtcgtggaagtcgtcatagctcccatagtgttcagcttcattaaaccgctgtgccgctgcctgacgttgggtatctcgtgtaatgactggtgcggcgtgtgttcgttgctgaaactgatttgctgccgcctgacgctggctgtcgcgcgttggggcaggtaattgcgtggcgctcattccgccgttgacatcggtttgatgaaaccgctttgccatatcctgatcatgatagggcacaccattacggtagtttggattgtgccgccatgccatattcttatcagtaagatgctcaccggtgatacggttgaaattgttgacgtcgatattgatgttgtcgccgttgtgttgccagccattaccgtcacgatgaccgccatcgtggtgatgataatcatcattgtcatgatgatgatggtcatgatcgtcgtcgtcccagtcgatgctgctgaatagtgcgtacgtggtagcaacgcccatgctatagccgaatccgcgtacaaagctgtcaacaaacggttctccggctggtggtggcagataaaccggcggatacgcagtattggcccagttcccgtaaaccacggttgggttgtagttgggaatatagaccacatcaggattggcgggctcaatggaaatgacggttgttgccggctctgtaatgacggggttggcagttaaaactgtattggatggtatgacgggtgccgtgactgtctgttttaccggtacagctttcttcgttgtggtaataactttctgttcggtactactcttcaggctgccggtttgttgcgccagttgccgcaatcgctgtacgctgtccatcacgtcctgcggctgggccagaaaagcatcgcccaggttttgcacccattgcgggttttcgcccatcaatgccatcaattgtggaaaggccaccagacttttaacgctggcgtcccacggctggtcagataccgcctgaatagcagcatcgccttgtttaagtggattatcgtggctccattgcactgcttgagcaacgtttgtcggataggtacttgccatcagcacctggctaagtagggcgtcgggatacagcgcgacgggcgcgacccattgatctatttgtgcagtgctgaatgcggatttgacgacggcgggtgttacgggaggtgcggaaaccgttgcaggaaacgtaaccgcggcagcgtcagacacagccagttgtgtgctttgcggttccacaggcgcttccactgtgcggctttttatatatagcccggtagaggcggcacaaagcccggcactgcaaattagcgccagcacatggggtttaaacggcaaagtcattttcataattcggatctcaaggaaatcgcaatggtcggcgaactgccacccgcaggtgctgtgaatccgagtataaagaggcggtagtttaaattttgactaatcttgggattcgttgagaaaggtgattatcaccatgcgaattaacgaagtttttacggagggaaacaatctctagaccatccttaacgattcagccacttttttatgttgcttttttgtaaacagattaacacctcgtcaaaatcctgctattctgcccgttgcggtactgggcatttaccctacaaactgctgtctcacaggagcgtgaagagaatcgcctgccgcactatgacaatgagagcgaggagaaccgtcgtgctagaagaataccgtaagcacgtagctgagcgtgccgctgaggggattgcgcccaaacccctggatgcaaaccaaatggccgcacttgtagagctgctgaaaaacccgcccgcgggcgaagaagaattcctgttagatctgttaaccaaccgtgttcccccaggcgtcgatgaagccgcctatgtcaaagcaggcttcctggctgctatcgcgaaaggcgaagccaaatcccctctgctgactccggaaaaagccatcgaactgctgggcaccatgcagggtggttacaacattcatccgctgatcgacgcgctggatgatgccaaactggcacctattgctgccaaagcactttctcacacgctgctgatgttcgataacttctatgacgtagaagagaaagcgaaagcaggcaacgaatatgcgaagcaggttatgcagtcctgggcggatgccgaatggttcctgaatcgcccggcgctggctgaaaaactgaccgttactgtcttcaaagtcactggcgaaactaacaccgatgacctttctccggcaccggatgcgtggagtcgcccggatatcccactgcacgcgctggcgatgctgaaaaacgcccgtgaaggtattgagccagaccagcctggtgttgttggtccgatcaagcaaatcgaagctctgcaacagaaaggtttcccgctggcgtacgtcggtgacgttgtgggtacgggttctagccgtaaatccgccactaactccgttctgtggtttatgggcgatgatattccacatgtgccgaacaaacgcggcggtggtttgtgcctcggcggtaaaattgcacccatcttctttaacacgatggaagacgcgggtgcactgccaatcgaagtcgacgtctctaacctgaacatgggcgacgtgattgacgtttacccgtacaaaggtgaagtgcgtaaccacgaaaccggcgaactgctggcgaccttcgaactgaaaaccgacgtgctgattgatgaagtgcgtgctggtggccgtattccgctgattatcgggcgtggcctgaccaccaaagcgcgtgaagcacttggtctgccgcacagtgatgtgttccgtcaggcgaaagatgtcgctgagagcgatcgcggcttcagcctggcgcaaaaaatggtaggccgtgcctgtggcgtgaaaggcattcgtccgggcgcgtactgtgaaccgaaaatgacttctgtaggttcccaggacaccaccggcccgatgacccgtgatgaactgaaagacctggcgtgcctgggcttcagcgctgacctggtgatgcagtctttctgccacaccgcggcgtatccgaagccagttgacgtgaacacgcaccacacgctgccggacttcattatgaaccgtggcggtgtgagcctgcgtccgggtgacggcgtcattcactcctggctgaaccgtatgctgctgccggataccgtcggtaccggtggtgactcccatacccgtttcccgatcggtatctctttcccggcgggttctggtctggtggcgtttgctgccgcaactggcgtaatgccgcttgatatgccggaatccgttctggtgcgcttcaaaggcaaaatgcagccgggcatcaccctgcgcgatctggtacacgctattccgctgtatgcgatcaaacaaggtctgctgaccgttgagaagaaaggcaagaaaaacatcttctctggccgcatcctggaaattgaaggtctgccggatctgaaagttgagcaggcctttgagctaaccgatgcgtccgccgagcgttctgccgctggttgtaccatcaagctgaacaaagaaccgatcatcgaatacctgaactctaacatcgtcctgctgaagtggatgatcgcggaaggttacggcgatcgtcgtaccctggaacgtcgtattcagggcatggaaaaatggctggcgaatcctgagctgctggaagccgatgcagatgcggaatacgcggcagtgatcgacatcgatctggcggatattaaagagccaatcctgtgtgctccgaacgacccggatgacgcgcgtccgctgtctgcggtacagggtgagaagatcgacgaagtgtttatcggttcctgcatgaccaacatcggtcacttccgtgctgcgggtaaactgctggatgcgcataaaggtcagttgccgacccgcctgtgggtggcaccgccaacccgtatggacgccgcacagttgaccgaagaaggctactacagcgtcttcggtaagagtggtgcgcgtatcgagatccctggctgttccctgtgtatgggtaaccaggcgcgtgtggcggacggtgcaacggtggtttccacctctacccgtaacttcccgaaccgtctgggtactggcgcgaatgtcttcctggcttctgcggaactggcggctgttgcggcgctgattggcaaactgccgacgccggaagagtaccagacctacgtggcgcaggtagataaaacagccgttgatacttaccgttatctgaacttcaaccagctttctcagtacaccgagaaagccgatggggtgattttccagactgcggtttaaaaagtcagcgcacgcgctgcgcataaacgacacaatgcccggtgaatgagattcccgggcatttttttatttctaaaccatcgccgttccgctgtttttctccggtaaggctgcgataattacatcaatggcgcaatgcgatttcggtgcattgccgggagcagaggaacacactatggattacgaatttctgcgcgatattaccggagtggtaaaggtgcgtatgtccatggggcatgaagtggtcgggcactggtttaatgaagaggtgaaagaaaacctggccttgcttgatgaagtggaacaagcagcgcacgcactgaaaggtagcgaacggtcctggcaacgggcagggcatgaatacaccctgtggatggacggtgaagaggtgatggttcgcgccaatcaactggaattcgctggcgatgaaatggaagaggggatgaactactacgacgaagaaagcctgagcctatgcggcgttgaggattttctgcaggtcgtggcggcttaccgcaatttcgtgcagcagaagtaaataaatctggcggagcctgggagctccgccagagccgttaaacagctggcatattgcgcccgtaataaatctcgcgcatttctttccacagcgcagcggtaatttcctggcgctcgctgtcggttaagtcttccggtttggtgtggaacatgtagtgcttaaggtcgaactctttaagcaacatcttggtatggaagatattttcctgatagacgttcacatccaccatgtcatacagcgccttcatatcgtcagacataaagttctgaatgctattaatctcatggtcgataaagtgcttcataccgttaatgtcgcgggtaaaaccgcgcacgcgataatcaatggttacgatatcggactcaagctggtggatcaggtaattcagcgccttcagcggagaaatcacgccgcaggtagagacttcaatatcggcgcggaaggtacataaaccgccttcaggatgactttccgggtaggtatgtacgcaaatatgacttttatcaagatgggcaacgaccgtttctggcagtgggccggggtgttctgttttgtcgatgagtttcgggtcaaccggttcttcactcaccagaatagtgacgctggcaccctgtggttcgtaatcctggcgggcgatgttaagaatattagccccgataatggaacaggtttcactcaggatttcggtcagacggttggcattatagagttcatcgatataagcaatataaccgtcgcgctcttcggcagttttggcgtagcagatatcgtaaatacaaaaactcagacttttggtcagattattaaagccatgcagtttcagttttttcaatttcttatcttctccttaggacggctgactagccagtgcgtcttgcagatactgaggtaaggcaaaagctgccgtatggattgccggattgtaataacggcatttcaggccagaggcgagaaaacgcgcctgaataatttcggtactgagatggcgtaaggcgtcgttatctgtcgcccatgcaaaagtcatgataccgccgtaataggtcgggatcgccgcctgataaaagccaacgtcgctgaagtaatggctgagtttgcgatggctgtcgatggcttcttcctgctgtaaaaagcagacgccgttttgtgcgacgaagataccgccaggattcaggcaacgtttgcagccttcataaaatgcgctagtgaaaaggctttcgccgggaccgataggatcggtgcagtcggagataatgacatcaaaggtctggctggtttgattaacgaaattgacgccatcgtcgatcaccagcttaaagcgcggatcgtcgtagctaccggcgttatggttgggtagatactgacggcagaagcttacgacacccgcatcgatttccaccatcgtgatactctcaacgtttttatgtcgggttacttcacgcagcatggcaccgtcgccgccgccgataatcagcacatgtttcgcgtgaccatgggccagtagcggaacatgggtcatcatctcatgatagataaactcgtcgcgctcggtggtttgtactacgccatccagcgccattacgcgaccaaatgcagcgttctcaaaaatgatcagatcctggtgatcggtcttttcatgatacagaacgttatctaccgcaaagtactgcccaaactggtcgtgtagcgtttcatgccactgttttttttcggccatgggttgatacctcctttgttaacacccgtaaaaaaagggcgcaacataatagctaacattgaccgcggatgcacggtcaatatttctacaaaaaggtatcagggattatttgacgtaggcaagcaggcttaaggaatcgcgggccagggctttgcattttttagcgacgggaatgccaatgccgctgagatcgcggtagctgtcttcaccgagggctttcatgtcgaaggtgtcgtaattactgaggtcccactggttttgctgagcgaaaaagaccagtgcgcgacgaatttgcccgttaggtaagttctggtaaccacaatcgttcttcagaaagacaaaaactgccgttaaatcggccatatcttcggcttcagactcgctgagcgcgtaactgtttgcgcagacggccatcaggctgccgaataacactgttctgaaaaacgtcttcattgcttctaccaggggcttaaagaagataaacgttagcacactgcgagcgaggcgacgaccattattgtcgattaaattgtgtctgcggcttgaccttcccgtaaggggaaggactatgctcaacgtttgattttgtttcgcctgcttaagaataaggaaataactatgcaacgtcgtgatttcttaaaatattccgtcgcgctgggtgtggctagcgctttgccgctgtggagccgcgcagtatttgcggcagaacgcccaacgttaccgatccctgatttgctcacgaccgatgcccgtaatcgcattcagttaactattggcgcaggccagtccacctttggcgggaaaactgcaactacctggggctataacggcaatctgctggggccggcggtgaaattacagcgcggcaaagcggtaacggttgatatctacaaccaactgacggaagagacaacgttgcactggcacgggctggaagtaccgggtgaagtcgacggcggcccgcagggaattattccgccaggtggcaagcgcagcgtgacgttgaccgttgatcaacctgccgctacctgctggttccatccgcatcagcacggcaaaaccgggcgacaggtggcgatggggctggctgggctggtggtgattgaagatgacgagatcctgaaattaatgctgccaaaacagtggggtatcgatgatgttccggtgatcgttcaggataagaaatttagcgccgacgggcagattgattatcaactggatgtgatgaccgccgccgtgggctggtttggcgatacgttgctgaccaacggtgcaatctacccgcaacacgctgccccgcgtggttggctgcgcctgcgtttgctcaatggctgtaatgcccgtagcctcaatttcgccaccagcgacaatcgcccgctgtatgtgattgccagcgacggtggtctgctacctgaaccagtgaaggtgagcgaactgccggtgctgatgggcgagcgttttgaagtgctggtggaggttaacgataacaaaccctttgacctggtgacgctgccggtcagccagatggggatggcgattgcgccgtttgataagcctcatccggtaatgcggattcagccgattgctattagtgcctccggtgctttgccagacacattaagtagcctgcctgcgttacctagcctggaagggctgacggtacgcaagctgcaactctctatggacccgatgctcgatatgatggggatgcagatgctaatggagaaatatggcgatcaggcgatggccgggatggatcacagccagatgatgggccatatggggcacggcaatatgaatcatatgaaccacggcgggaagttcgatttccaccatgccaacaaaatcaacggtcaggcgtttgatatgaacaagccgatgtttgcggcggcgaaagggcaatacgaacgttgggttatctctggcgtgggcgacatgatgctgcatccgttccatatccacggcacgcagttccgtatcttgagtgaaaatggcaaaccgccagcggctcatcgcgcgggctggaaagataccgttaaggtagaaggtaatgtcagcgaagtgctggtgaagtttaatcacgatgcaccgaaagaacatgcttatatggcgcactgccatctgctggagcatgaagatacggggatgatgttagggtttacggtataaaaagaccgtattcggaaatatgcccggatctctccgggcattaaactgatgacaaacgcaaatctgcctgatgcgctacgcttatcaggcctacgctagctgtgcaatccattgattttgcacaattttgtaggctggataaggcgttcacgccgcatccggcatgaacaacgcgcacgttgtcagcaatctgagcaagtcttacttcacatcatccggcagcgcataagccacaatatagtcgcccatcttcgtaccaaaactaccgtgaccgcctgcggagatcaccacatactgcttaccattcacttcataggtcattggcgtagcctgaccacccgctggtaaacgaccctgccacagtttttcaccgttgctcatgttgtaagcgcgcaggtagttatctgccgtagcggcgataaacagcacgttacccgccgtggagattggcccgcccagcatcggcatacccatattgaacggcaccggaaccggcatcgggaacggcatactgtcctgcggcgtaccaatacgtttcttccacaccacttcattagttttcagatccagcgcgctgatataaccccatgctggctgtttacatggcagaccaaatggactgaggaacgggttgagcgtgacaccatacggtacaccgtactgtggctgaatgccggattccgtacccgtgcctttggcatctttcggctgctccatcgggttgccaggaccacgcgggatcagtttgctaacaaacggcagtgccattgggttggcaatcgccacttcacgatttggatcaacggaaatcccgccccattcgaacatccccaggttacccgggaagaccagcgtaccctgttcagatggcggggtgaaaatgccttcatagcgcatctggtggaacatcacgcggcacaccagttggtcaaacatggtggctccccacatatccgcaccgctcaaatctttcgtcggacggaagctcagttcagaaaacggttgagttggggttacgtaatcgcctttcgctgcaccttggggaaccggtttttccggtgccggaaccaccagttcgccattacgacgatcgagcacaaaaatgttgccggttttcgccggagcgtaaataactggcactttctgaccattaacggtgatgtccgccagcgtcggctgtgccggaagatccatgtcccacaggtcgtggtgaacggtctggtagctccacgccagtttcccggtagtggcattcagcgccagaatgctgctggcataacgttcctgttccggtgtgcggttaccgccccagatatccggcgtggtcacgcccatcggcagatagaccagatccagcttcgcgtcataggccgctggtgcccaggagtttgggctgttaaaggtaaaggtgtgttcgtcagacgggattgcgttcggatctttcgcgccgggatcaaaagcccacagcagctccccggtgttgacatcaaaaccacggatcacgccagacgtttcgcgggtactgaagttatcggtaacactaccggccatcacgatggttttatcggtgataatcggtgggctagtcggttcatacagacccggtttggtgtctggcatattgctttgcagattgagcacgcctttattggcgaaggtttcgcacagtttgccgttttcagcgttaatcgcaatcagtcgaccatcattgaccggaagaatgatacgacgcgggcaatccgccatcacttccgggctagcggtttctgctttggcttcatgataagagacaccacggcaggttacgtgctggaaagactcgttggttttcagctcaggatcgtaatgccatttctctttgccgctggcggcatcaagcgcaaacaggcgctggtgagcggtacacaggtaaagggtgtcgcccactttaatcggcgtcacttcattggtgatttcacccggatcgttcggctgcttcacatcgccagtacggaacacccaggcttctttcagattatggacgttatcggcgttaatttgtttcagcgggctaaagcgttgaccttcctgattacgaccataggcaggccagtcctgatcggctacgggggagatagcttcagcaggtgtggcatcggcgcttaaggtgccgttgatctcctgcggatcgttaaatccggcccaggtcaggataccaccgctaatcagcagtgcgaccaccagtgcggcaactgcgccgctggcaggaatgaccaggcgacgccagacaaacggcaggatcagccagatgccgaagaagaccagaatgtcgctgcgcggagtcagcgcccagaagtcgaaaccaacttcccagacgccccaaatcatggtgccgagcagcagggctgcgtatagccaaagcgcggcgcgtttactgcgccacagcatccaggcgacgccgagcatcacaaggccagcgatagggtagtaccaggagccgccaatcgcgaccagccagcctccgccaatgagtagatacagcccgcaaagcgctgcaaaaagggctgttagcgtgacgagtaatcgtcggctgcctgtattgttaattgccataaagagacaccatttcaattcattaatattttagtagcaattaattataggttttaacatgtgtgatcgtcatcacaattcgagctttattaacagattccgcgaatgaatagttttactggtatactgcgtgtcttgcgctttgttgcggtgccaaaacctgcccgtgcgaagtgatttgtttttaaatcatatggttagagatatgaaacatactgtagaagtaatgatccccgaagcggagattaaagcgcgtatcgccgaactgggtcgtcagattactgagcgttacaaagacagcggcagcgatatggtgctggtgggtctgctgcgtggcagttttatgtttatggcggacctgtgccgtgaagttcaggtatctcatgaagtcgactttatgaccgcctccagctacggtagcggcatgtccaccacccgtgatgtgaaaatcctcaaagatctggatgaagatatccgtggcaaggacgtgctgattgttgaagatatcatcgacagcgggaatacactgagcaaagtgcgtgagatcttaagcctgcgcgaaccgaagagcctggcgatttgtacgctgctggataaaccgtcccgtcgtgaagtgaacgtcccggtagaatttatcggtttcagcatcccggatgagtttgtggtgggttacggcattgattacgcacagcgttaccgtcatctgccgtatatcggcaaagtgattctgctggacgagtaagtgtgaagttgccggatgtgttgcatccggcatggcatttttatttgtggttggcgtgtttcagcttgaggttggaaatcccgtgacggtaacgttgctcaagggtttcgcggttggtggcggtaacatccagatcacgcagcaagccgtcgtgaatgccgtaggcccagccgtgaatggtaactttctgcccgcgtttccacgcactttgcataatggtggagtggcccaggttatacacctgttccatgacgttcagttcacacaaggtatccagacggcgctcttgcggcatttcgccgagcaaactgctatgtttgaaccagatatcgcggatatgcagcagccagttgttgataagccccagttccgggttttcaactgcggcttgtacgccgccgcaaccgtagtggccacagataataatgtgttcaacttcgagtacatccactgcatactgaaccacggaaaggcagttcaggtcagtgtgaatgaccaggttagcaacattacggtgaacaaagagttcgcccggttcaagaccggttaaacgttctgcaggaacgcgactgtcggaacatccaatccatagaaagcgcggtttttgcgcttgtgccagtttctcaaaaaacccgggatcctcttccaccagcattttactccatagtgcattgttgctgatgagtgtatctatgtctttcatggaggttaacgacctgtaaccaaataattacgtttggctaatatagggcaactccgggacgatttaaaccacagataaagtgtaagaacgtaaggtaagtaaaaatttatgaccattgcactggaacttcaacagcttaaaaaaacctatccaggcggcgttcaggcgcttcgtgggatagatttgcaggtcgaagcgggtgatttttatgcgcttctcgggccgaacggggccgggaaaagcaccactatcggtattatcagctctctggtaaataaaacctccgggcgggtcagcgtatttggttacgatctcgagaaggatgtcgtgaacgctaaacgtcagttgggactggtgccgcaggaatttaacttcaacccgtttgaaaccgtgcagcaaattgtggtgaatcaggcagggtactacggcgtggagcgcaaagaagcgtacatccgcagcgaaaagtatcttaaacaactcgatctatggggaaaacgcaacgaacgtgcgcgtatgttatctggcgggatgaagcgccgtttaatgattgcccgtgcgttaatgcatgaacctaaactactgattctcgacgaaccgaccgcaggcgtggatattgaacttcgccgcagtatgtggggctttttgaaggatttaaacgacaaaggcaccaccatcattctcaccacacactacctggaagaagcagaaatgctgtgccgcaatatcggcattattcaacacggtgagctggtggaaaataccagcatgaaggcgctgctggcgaagctgaaaagcgaaacctttattctcgatctcgcaccgaaaagcccgttaccgaagctcgatggctatcagtatcgactggtcgataccgcgacgctggaagttgaagtgctgcgtgagcaggggatcaacagcgtatttacgcagttaagtgagcagggcattcaggtattaagtatgcgtaacaaagctaaccgtctggaagagctgtttgttagtctggttaatgaaaaacaaggagatcgcgcatgatgcatctttactgggtggcgctaaaaagcatctgggcgaaagagatccatcgctttatgcgtatctgggtgcagacgctggtgccgccagtcatcaccatgaccctttactttattatcttcggtaacctgattggtagccgtattggcgatatgcatggcttcagctatatgcagttcatcgtaccggggctgatcatgatgagcgtgatcaccaatgcctacgccaacgttgcgagtagtttttttggtgccaagttccagcgtaatattgaagagctgctggtagcgccggttccgactcacgtcattattgccggatatgtcggcggtggcgtggcgcgtggtctgtttgttggcattctggtgacggcaattagtctgttttttgtgccatttcaggtgcatagctgggtattcgttgccttaacgctggtgctcacggcggtgttgttctcccttgcgggtttgctgaacggtgtgtttgccaaaacgttcgatgacatcagcctggtgccaacctttgtgttaacgccactcacgtatttgggcggggtcttttacagtctgactttgttgccgccgttctggcaagggctgagccacctgaacccaatcgtttatatgatcagtggtttccgctacggcttcctcggtatcaatgatgttccgctggtcactacctttggcgtactggtggtctttattgtggcgttttatttgatctgttggagcctgatccaacgtggacgtggtttgcgtagctaaggctatttcctctcctctggatttgggggagaggagttttgacggctatcaccctttatcaacaatggtcagggtagactgattttcggctaaggaggaaggcgatgttaggttgggtaattacctgtcacgatgaccgggcgcaagagatactggatgcgctggagaaaaaacatggggcacttcttcagtgccgggccgtgaatttctggcgcggattaagctctaatatgctcagccgcatgatgtgcgatgctctgcatgaagcggactctggtgagggtgtcatcttcttaaccgatatagccggagcgccaccgtatcgcgtggctagtttattaagccacaaacactcccgttgcgaagtgatttctggtgtcacgttaccgttaattgaacagatgatggcttgccgtgaaaccatgaccagtagtgagtttcgcgagcgtattgtcgaactgggtgcgccggaggtgagtagtctttggcaccaacaacaaaaaaatccgcctttcgtcctcaaacataatttgtatgagtattaacccgcgattctgatggcgcttttgctacaataaaagcgttgtttcaccctcggttattttttcatgtacaaacaagctgttattctcctgctgatgctgtttaccgcaagtgtcagtgccgcgttacctgcccgttatatgcaaaccatcgaaaatgctgcggtctgggcgcaaattggtgacaagatggtgaccgtggggaatattcgggccggacaaatcattgccgtggagcccactgccgcaagttattacgcatttaattttggctttggcaaaggttttatcgataaaggtcatctcgagccggttcaggggcgacaaaaagttgaagacggtttgggcgacctcaacaagccgctgagtaatcagaacttagttacctggaaagatacgccggtctataacgcgccgagtgcgggaagtgcgccatttggggtactggcggacaatttgcgctacccgattttgcataaactgaaagacaggttaaatcaaacctggtatcagatccgtattggcgatcgactggcctatatcagcgcactggatgcccaacccgataatggcctgagcgtgctaacctatcaccatattctgcgcgacgaagaaaacacccgttttcgccatactagcacgaccacaagcgtacgcgctttcaataaccagatggcctggctgcgtgacaggggatacgcgacactgagcatggtgcagctggaaggctacgtgaagaataagatcaatctccctgcgcgagcggtggtgattacctttgatgatggcctcaagagcgtgagccgctatgcgtatcctgtgttgaaacaatatggcatgaaggcgacggcgtttattgttaccagtcgcatcaaacgtcacccgcagaagtggaacccaaaaagcctgcaatttatgagcgtttctgagcttaacgaaattcgcgatgtatttgatttccagagtcatacccattttttgcatcgggtagatggttatcgccgacccatattactgagccgtagtgagcacaatattctgtttgattttgcacgtagtcgccgcgctctggcgcaatttaatccgcatgtctggtatcttagctatccgtttggcggatttaatgacaacgccgtgaaggcagcaaacgatgccggatttcacctggcggtgacaaccatgaaaggcaaagtaaaaccgggggataatccgttgttactaaaacgactttatatcttaagaacggatagcctggagacgatgagccggctggtgagtaaccagccgcagggataacaatcaagcaacctgtaccggaatcgctttcgcggtacgtttcatttcattgtcgccttcaaaataggcgacgttgggtcgccaggtgcgagcttcttcatctggcatggtaacgaagctggcgatgatgacaatatcgccgacactggcgcagtgggccgccgcaccgttaacagaaataattctgctaccgcgttctgccgcgatggcataagtggagaaacgcttgccgttggtgacattccagatatcaatggcttcgttttcgagaataccggctgcgtcaagaaaatcctggtcaatggcgcaagaaccttcatagtgcaggtccgcatgagtcactttcacgcggtggagtttgccctgcagcatcgtgcgaatcataacttctacctttctaccctgtcgttaacgaagcaggcgatgcctgctttgaggaaattctcacgcagtattgcccgatttttgtttagtgtctactcatctgacggcatttgcgtcagcagtttgcgtaccgcgccgaagcgtgccatgtatcgcctgtaacgaattgatatttctctgaacgctgctcggtaaacaataaagaggtggctgacgatagcgcgccttgactggatactgccttcacgcaaagccacacggaagacagggaagatggatgcaccgagtaccacaccgcatgacgcggtatttaaacaatttttaatgcatgcggagacggctcgcgactttctggagatacatttgccagtggaattacgcgaactttgtgacctcaacacgcttcatttagagagcgggagtttcattgaagagagcctgaaaggacacagcacggacgtgctctattccgtgcaaatgcagggcaatcccggttatctgcatgttgtgattgaacaccaaagcaagccggataagaaaatggcctttcgcatgatgcgttattctatagccgccatgcaccggcatctggaggctgaccacgataagctgccgctggtggtgccgatactgttttatcagggcgaggccacaccttatccgctaagtatgtgctggtttgatatgttttacagcccggagctggcgcgacgcgtctataacagtcctttcccgctggtggatatcaccatcacaccggatgacgaaatcatgcaacatcggcggattgcgattctcgaactactgcaaaaacatattcgccagcgcgacttaatgttattgcttgagcaactggtcacgctgatcgacgaagggtacactagcggaagtcagttagttgccatgcaaaactatatgctgcaacgcggtcatactgaacaagcggatttgttttacggtgtgttgagagacagggaaacgggaggggagtctatgatgacgctggcgcagtggtttgaagagaaagggattgagaaggggattcagcagggaagacaggaagtaagtcaggaattcgcccagcgtcttctgagtaaaggaatgtctcgggaagacgttgcagagatggcaaatttacctcttgctgagattgataaggtaattaaccttatttaagttacctgtgttatgacagatgacgtggggtaaattaataactggcgccatcagccgtagcgccagttaagtattacgccagctcgaccattttgttgtcgatcaggcgagcatcgccaagccaggcggctaccagaattactgcccgtttgctggtttcagaaacttccagcaatgtgtcggcatcgcgaatctgaatatcatcggcgcggaagcctttttcattcagttcttgccccgcaatggtaataatttcatcgagatcccgttccccagcctgcaatttgtcagcaatgctacttaaaactttgtacagaccaggcgcaattttgcgttgttccgccgtcagataaccgttacgggaacttagcgccagaccgtctttggcgcgcataattggcacaccgacaatctcaatatcgaagcccatatcggcaaccattttgcggatcagcgccagttgctgaaaatctttttcaccgaagcaggcgatgtccggctggaccaggttgaacagcttgctgacaatagtgctaacgccgcgaaaatgtcccggacggctggcaccttccagcatggtgctaaggccaggaacgtcaacgtaagtgtgggtttcagtaccgttcgggtagatctcttttacgctaggggcgaaaactaaatccactttacgtttgtttagcttctcgcagtcctcctgcaaggtccgtggataacgagccagatcttccgggcggtcgaactgcatcgggttaacgaaaatactgacgacgaccacatcggcgcgggctttggcttcgtcgaccagcttcatatggccatcgtgcaggttacccatggtaggcaccagcgccacgcgcttgccttccatacgcaggcggcgaatttgctgacgcagcagcggcagggtttcgataattaacacaacgtgactccttaatggaaactgtgttcttcgcccggataaacgccggactccacttcagccatatactgccgcacagccgcgcggatgtcgcccgtttcggcgaggaaatttttagcgaatttaggaatgtgaccgccggtaataccaaaggcgtcgtgcatcacgaggatctgcccgtcagtgacgttgcctgcgccaatgccaataaccgggatcgccagtgcttcggtaatacgttttgccagttcaaccggcacgcattccagcaccagcagctgtgccccagcagcttctaaggctaatgcatcgctgagcagttgatcgcccgcttcatcgccgcgcccctgaactttgtagccaccgaaaatattcacactctgtggtgttaaacctaagtgaccacatacaggaacggcacgttcggtcagcatttgtacggtttctaccagccactcaccgccttcaattttgaccatgttagcaccggcacgcataaccgttgcggcgttttcgaaggcttgttccggcgtggcatacgccataaacggcaggtcagccagcagcaggcagtttggtgcgccgcgacgtacggcggcagtgtggtaggcgatatcggcaacggtaactggcagggtggagtcgtgcccctgaaccgtcatgcccaggctatcgcccaccagcatgacgttaagcccttcatcagcaaagagtttggcgaagctatagtcataagcggtgatggtcgcgaaacgttttttttcctgtttgtacttctgcagtaaggagatggtggtcggtttcataacgtatcctgataaattgatgttgtgctgtctggcattttatcagtcacattggtgggggcaatgatttatccgtagcagcactgccagaaggtgacagtgctgctacgttatcagggataggttacctggaaagtactggtggctttaaattcgccgggttcgatagcaatattcccgtcttgctttaatgttgcctggaaatgaagaggctgacttgtgccgttaccttgattagggtaaaccccatcggaggtgtcatcttcggtttcataatctatataaacagaattcgtatcattaggttttaatgtcattagcggatttttactggttgctaaaccttcaatgagtacgccaacgcctttggcggcagtgcttccagtaagcgtattaccaagcagttgtgtgttttgagtacctacttttccagtgacgagttttgtttcaatattacgcacacgaatacaattctgaaggctgatatcaaagggaacaggactagcgccatttttaattgtcccagagctatattctcccattctaaccgtactaccattgacacttggcccggtaagtatggaggtaaaacatgttggtaaggttaatttgacattattcagtgtgaaattgacataaatgtggttgctgtgatctacaacttttgtaccaggactgtaggccttaaagctataaaggtaattactactactggataactggacttgctgattaagtgtaggatcgaaattagtatctgtataaaattcaacagttatgttgtgtactataccaccaatagcccaaaacttatcgtagtcgtctgctttgttgcaacccttagtttgtagatcgctgtctgtgacggaaaagaaaaattcttggttggaaggatctccgatatagattcctgggctttgaatgtcagttattgtatcgtatgcagaccagaccctacttattaacatggtgtaatacagaccaggaacagatgtattaaatagtttatgtccgccataatctttaccactatagaccatggcattttcaatagttattggaccaggattcgctctgccagatgtattgcagtaaagaataccaccaccggtacctgtatccaggtaactccagtacatttttaccccagtcgggccgagctgcgtgggtttataaaaaaccaagttgcttgctgtacttgtgtaattaaaggtcatctgtgcggcagtggaggggcctcgatagttatcaactcctgcattatttcccacaataaaacttgtatatgcactgactgtattacaacaagaatacagtgctaaaaaaagaatgtacctgaagatagtcttcatttttactccaatgtttctttattgttatggtttgcgctgtttttgtttgttattcgtagtaaatatccactaacacatggctcataagttgaccagatgtaacactcaatgcaggatcgattttttgcattcgggtgctaaatttccaggaactaccattcatgtcatcgctcattactggataaacggaacgagatccgccactagcattaagaacattgaatgtattcgcgctatcctgagtagaaaatataactactcctacattacttgctccactgctaatttcattagcaaatatttgcctagagccagcagccatgacaccgctaagggctctaaaatcaatatgtaactgatttagcacatcgccagttccctgtaatgcacagtcggatacagtgatagtgaactcttttccacctggttgataactttcaggagtaacattaccactaaaatatcccaccccaacgacgccaagatcaatattaccctggttactgattccgcttttgcaggtgctgttttttacattggcaacaaggtcaatatcctgtccagcaatggctggacaggcgatgcaaaacagtaaactcagaaacagaattattctcttcatcagcttacgttgagtgggatgcatatatagttcctgaatctgtaagtctgttagttataggttactgtaaatgtggctggtgcagaaaacttacccgcagtgacattgtttacggttttatttttttccacgaccaggcgtgcactcatcggataataaacgaccgcattggctgcagtggagattgttacctcttgacttgctggtgttacacagctaaattgtgttgcactccctgttgccggagttacagtgctccagacttcaacggcgacagcacttgctttatctgcggctgtggaaccatttgcaaaccccgcaccgtcattagcagttccctcgcatgtggctcgcttggttaattttatttgcgcttttttattggggatacccgcacagtctttgaatttgagtttgaatgtttttactttggtcttggcattgatttcagaaatatatacatcaccaaaatcaacaacagaaatgtcctgatcagagtcatttactaatgtagcggtacaagtacccatttctacagtagtaataacggtcagtccaatactgtctgttgccgcataagagagtacgctgaacaaactggcagccaaaacgacactgctggataatccataacgtaaatttttaaatgtcatcataattatccttcttattgatagatgaaattaaacgtcgccagtgcacgaaaattccccggtacgccttgccctgcatctgtttcacgtagcgcaacggtcatttcaagacccttatcgggctgcatctcgtctgtgctccagcgtatcttttccgcactgttaggtttaaggaaagtggcatcatcagtagtccgttttttgaaacccataccgatattacttgtcgtgctagaactatcaccagactgcggtataataagcttaggactgctactacttgcatttccggtcagagtggtatcaatccaactgatgccactgctgcacccactggcaaccagtttaaaatcagcctgagattctgtcgttttattcgcgatcttatccagacccatcttagggattctcaatgtgtagttattattgccatcattcgtgacgttattaccagtaagtgtgatgttacaggttgtcgctttgacagtggctgtaaactctacattaatatccgttgcaaatacactgggacttaataatattcccatcagtatcactattttatgtggcgttgtttttatcatttgacgtcccttgtagttactgaatctgacaccgaattccattcagaataatagattgtgctattttttctgcttctgggctttgttgataatgcgcaagacaacttacgggtttactttgttcgagccatttaatgctgatatttccctgctgctcaataccacgaacaaatgcttgtccaccctgtccaacattaccaatgacattgccttgctcatcataaatatctgcagcaaatggaatatttttaccatcacttcgtgtgatgttcataatggcactttgcccttgcacggtttcaaaatcagcaaagacgacactaccctgacgcggtacagctactgcactggtactttttaattcaacatcgttctcaagatcgttgatatccagcgcgatacggttttcatgataaggagaaagagcgctggtgacaccataaccccatcgatcgatagtactgttgccataatttattcgcgctccttgagcacctggagcctgaactaccgccagtgtatcggagtcgctaaaactatcattactgaaagtcagtccaccgctatgcaatacaaaaccaccgtcggtgctgagagaaacttgacggctgttatcgctatttgcagaaatactacctgccagcgttccccatggactctcatagctggcataacccccaacataactcaaatctttgctggctttattcatcgtatagccagtattcacgctataactgacgcgagcgttatcgctatagccactgctgctaacgttgagttggttattacccttaaagtcactgcttatttgagtatcaatactctggaaaccactagtacgttgttcagtgccaagtaatttttcaattggaatggtgaaactaagataaacgctatcgtcagtgtcgccgtcttcattccaactacgctgggcactgacactgtagctgccccaggatgtactgttactgtagccaatagagtaattgctacgattttgtccggaagcccagtaatcggaccaacttccggaaagataaaaactaccgtaatcttttttctcaaatttcaacggttggttaatactgaccgtaacctgatttttcatgcgactgtaattacgcatggatttcggttcaagatcttgttcgggatgtttcacttcatcaattagagttagtgcatcattaagaccaaggtaattctgtgtgctatagcgataggccgcgatattcagactagtacttgtttcttcgaataacttgttccaggaaacacgataactttgcccctggtatgttttatcatccgggatacgaacattggaatgagtcacatcgaaagaaaatgcaccaacactagtattcagaccaagacctaacaaaccagcggtatagttattatcggttatctgaataccggtataacccgtcagatagttattcaggccgtagtagtagcttgcttgaaataaattaggctcatcctgaatatcatcttttaagacctgaccgccgctaatatcccaacgtccaacgccagggcgtaacatttgaacaacggaactgaaaggttggctgaatgtccgcttactgccatcggattcttcgatggtaacaataagatcgctgccgtacccactcggactcagatcatcaatgacgaaagcgcctggcggcaccgtcgtttcataaatcttatagccaccttgcgtaatagtgactttggcgttggtattggcaacgccatgaatgataggcgcaaagctggctaaagtcggaggcaacatgcggctgtcactgtataaacgaatgcctcggatactgacggaatcaaaggtttcgcccgtcgtataagactcaccaagaatgagttgagaacgcaggctggcgatatcacgctgaacataccgattcttaaaatcataattactgccagaatcggtcatccagttgtagttgccgctggcacgcagtcgccatgcacctaaattcatcccaccgttaaatgcagcataaatgctttcattttttcgaccaggggtttcactatgatatccgttgaggttgtaactcaacatggccgcattaatgccgttttcccataagcttggatcaacatagttttggtaatttttcattacccaggcttgaggaacgtctatatccagacgttgatcgttaacgtcataacgaacagaagcctgagggataatttccgtcaaattgaggcaattgccgagcgtttcatccctggcaagcagaacggctttttcgttatttatatcgggagaattaatatgaaactgcaataaattctttaatgtgatacaagcctgggcgttcttttttccttcaattgcgacaaatgtaatactttggttaatgattggttggtcgtttacataaacactgacgtcgtaaacacccggtatagcggggttaccttcactgtaccggctgagatcaatattagatgcattctgccccatcaggaaggtatggtcatattcaacgagttcagcactgaaagcagtattgcaatacagcagcgcgcaaaacgtggcgatacgggtcagatgatgataatttttagtatattctatagtcacgctatgcttcctgcggaattatatccttgcctgattacagcctggcattaccttcaattgcgccaccaaagtcattaatggcgtaaaaatgcacttttgcagaattcgctttgccattaaggccattgactttcatgacctcatcactaaatggtgcaatcattttcacatcaatcggatagcgtttaccgctagcttctaaatcaccactgctaaaagagacgtagtaaggggttggattggtcactcgtaaactcgccttaccttcactaccactccagaaccacttcagggctaacggggcttcagagggatttcccttcaatccatccgggcgatagaaaagttttatacgtgtgcgaaatgccagttgcagcaggctttgattcgcgaccttttctgcatctggttttggtggaacttccagtacgttaaaccagaacacgctctctctgtctttaggcagactggtgctggctgtgtacattaatttgattgtttgcccacgtttggcatcaatacggcttactggcggcgtagcagtaaaagggactgtaatactgccaggctcagcgttgtcatcgccagtatctaaccaactctggacaagcaacgggttattccctttattttccagacgtacgttgacacttttttgatcgcttttatatattacgcgagtaccgctaatgacaatgtccgcaatagagctactactaaaagccatacaggttacgaagcataaagctgttgtatgtttggtgttaaaaaacataaaccatccctgatagagttaattaaaacagggaataatataaaatagaaattattattccctgtatattcattcaatcaatttaactggtgaatacttactgataagtaatggtgtatgcagtgttagtttttacataaccagcagttgctgtttggtctgcgacggcacgaacgtaagacgctttaaaatcataaacagcagattttgtcgttgcatccagggctttagtatacacatcgccagggttgttaatttgaacctgtttgatagtggaaccatcaatattgtgtagagcgatattaacgccgtcagatgggttgttaatagacatgtcgttgttcaaagtccctttgctgttaccaaagaaaacagaaccgaaggtcattttagccgtgctacctggattcggatttgctttgctgcagtcaacggtgatgctgaaaggtttagctttagcgccaacggtgtcattcagtacgccagcatcgatttcaccaacggttgcggtttgcagcaggatcagaccatccttgttaccgccgtcaacgcgggtttcacaggtgttatcaacaaccagaccactgatatttaactgaccgccgtccatatcagcagaagcagtacctgcaaccatcgccagcataagaccagacagggcaaaacctaattttttagacataaaaatcctttaataaaattccattagtcagactacatgtttgaagaatgactattcatgacacaaataggagaaacaaatgttagatattaatgagcaatgatatttgttacccaaatttacaaccattgttcattaggtcgcctattgtgcactttagaagcttttgaacaaattaaatttacttaattcaaaattaagtaaaaataagttcacaagtgcaattggttagggtatggagatgggattgatatttatttataggaagttatattatttccgcaaagagatgtttaaactaaaatcgtaattaaggaaagagatgagatatgattttcagaaaatatttatattcgcaatataaataaattaccatttgtttaatttgtcaaatgctcttgtatgtaagatttgacgcaacatctccccatcaggaaacaccaactccggcgcgatttcaaacagcggccacagcataaatccacgattcttcatatcgtagtgcggaacggtcaggcgttcagtatttatcacttcattaccaaacagcatgatgtcgagatccagcgtgcgtggtccccagcgttcagctttgcggacgcgaccttgctgcaattcaatacgctgtgtgtgattgagtagctcttcaggtgcaagagaggtttccagcgccacggctgcgtttaagtaatcgggttgatcttgcggccccagcggtggggtgcggtaaaagctagaaacggtaagaatgtggctttcagggatatcgcctaatgctttcagggcagcattgacctgctccagcggagaggccagattgctgcctatggcaatatacgccactgtcatgcggtaccctcacgacgtggtgcgcgtttgcgtggacgacgagtacgacgacgcggactcggttcttcatccagctcgttgagcatccctttttggtctggtggcgcggaaacctggaactcaccccaccatttcaccagacgctgcagttcagcgttacgctcaacttcagctcgcaaggccaacaggtcataagccgcacggaacttaggatgctccagcagtttccatgcgcgtttaccctgacgacgggacatacgcaactgcaactgccagatatcgcgggttaatgtcgtcagacgtttcgggattgccagactacggcaggcttcgtccagcacgtcgttcatcgccagcgcgaaagcgtcgtgataggtcaggccgctttcctgggcgatcttctgtgccgtctccagcagtgggtaccagaacatggcggcaaacaggaacgccgggttcacgcgcatatcgttatggatacgcgtatcggtattcttcagcacctgttcaatgatccgctccatcgggctgtcgccattttccgtgaagtagcgggtaatggtcgggaacagcggctggaacagatgatattcacacaacagcttataggtttcgtaaccgtagcccgcttgtagcagtttaaggctttcttcaaacaggcgtgccggtgggatatcgttcagcagggtagcgaggcgagggatcggttctgcggtttccgggctgatgcgcatacccaatttggcggcaaaacgtaccgcgcgcagcatacgtaccggatcttcacggtagcgcgtttccgggttaccaatcagacggataacgccgtccttcagatccttcatgccgccaacgtaatcacggacggtaaaatccgctacgctgtaatacaggctgttgatagtgaaatcgcggcgctgggcgtcttcttcgatggagccgaaaatgttgtcgcgcagcaacatgccgttttgcccgcgttgggaggtcgtgcggtcgctgacgttaccttcgtggtgtccacggaaggtcgcaacttcgataatctccgggccaaacattacatgagccagacggaaacggcgacccaccaggcggcagttacggaacagtttgcgcacctgctcaggcgtggcgttagtggttacgtcaaaatctttcggctttttgccaagtaacaggtcgcgcacgccgccgccaaccagccaggcttcgtatcccgctttattgagcctgtacattaccttcagggcattttcactgatatctttgcgggaaatagcatactgctcacgcgggatcaccgtcacctgtggacgggcgactgcctgttcagcctcgctttcctcgcggcttagcaccttgcggcaaaaattagcgactcgggtaaaaatagtacacctcggtagtgtcaaacatcattcaggacaaaaaaatagcggctaatcatagctcagcaactcgcattactgaatgtactatttacaattgcgctctcgggcacggcggtaagccgccagtttttgacggcactctgaaggatttgctcgacgctgaaatcctgccagtgtgcttctgcctgctgccccagaaattgaagtgccgcgattagtaccgggcgtggatcgcctttcggcaacgcaggcgcatgattctgcttggaaagtttagcgccttgtggattaagcgccagcggcagatgaatgtaatctggcactttccagccaaaaagctggtacaggctgatttgccttactgttggttcaatcagatcagccccacgcactatttctgtaacgccctggaaatgatcatcaaccacaacagccaggttgtaggcgaacaacccatcacggcgatgaatgataaaatcttcccgtgccagtttttcgtcggcgtgaataatgccgcgcagctggtcagtaaattgcgtgaccggatgctgctggcggatacgcactgcggcgttgtctggtccatgatgcaacacccggcaatgaccgtcgtaaataccgccaatgctttgaatacgcgcacgcgtacaggtgcagtaataacttagtccttgttcatgtaaccaggcgagtgcttcacgataggcgtcgtgacgttggctttgccagagaacatcgccgtcccagtgcagaccgtaatgttccagctggcgcaggatagtttctgcggcaccgggaacttcacgaggcgggtcgatatcttctatgcgtaccagccagcgaccttgccgggcgcgagcctgcaaatagctgccgagcgcggcgatcagagagccaaaatgaagctcgccggaaggagagggggcgaagcggccaatatactgtgtgtctgtcatctctttgaacaaaaaataaggcgggagcatttcccgcctgtggtaaacgtgatggaacggctgtaattagccagccatctgtttttcgcgaatttcagccagcgttttgcagtcgatgcacagatcggctgtcgggcgcgcttccagacggcgaataccaatttcaacaccgcaggattcgcagtagccgaaatcttcgtcttccacttttttcagcgtcttctcgatctttttgatcagcttacgctcgcgatcgcggttacgcagttcgaggctgaactcttcttcctgggctgcacggtctaccgggtccgggaagttggctgcttcatcctgcatatgtgtaacggtgcgatcgacttcatccctgagttgattacgccatgcttccagaatacgacggaagtgcgccagctgggcttcattcatatactcttcgcccggcttctcctgatatggttccaccccagcgatggcgagaatactcagggagcttgttttacggttttgcccttcttgcatgttgcttctccttaacacgcactatcgatccccatgttcgggggaaaaatgaggccgctataaatagcagatgcttttccggatagcaattatctaaacgtaacacttgacaactgtgtgaggaaaagcgtatttgcgcacgcgaccagaatgtaaattaaccagttacttactttattacaatgtaaccggcagactttttttaagagccatgccttcagcagaaatttccgctttgtaagccagaatttctacccccctctgttgagcttcactcaatagttgcgcgtatttctcatcgatgtggcgcgcgggactaaaccgtgtaatggcactatgcagcacggcgaaaaagataaccgcacgctggccttcagccgctacgctcatcaactcccgaaggtgtttctgacctcgttcagtgaccgcatcgggaaaatatccctgttcgttctccgctaacgtaacgcttttcacttcaatatagcagtctggacggctatccgcctgcaacataaagtcaatacggctgcgttctgcgccgtattttacttcgcttttcaggctgctatagccactcagttcactaatactttcattaaggatagcctctttcgtcaacctgttagcccaaagcgtgttgacgcaaataaatgcgccgctctggctttgagttaattcccaggtgtgtgggtatttccgtttggtgttgtcactagtgctataccagacggtatcgccaggcgttgcacaaccggtcatcgcacccgtattcgggcagtgtagcgttaattcgcgaccatcgggtgtgatcacatcggctaaaaaacgtttgtaacgctgaattagcgtcgcgcgctgtagagggggagaaaattccattgcgacaatccttgttattgcgttagcgcccagcgttttagcggcgtgtagcgtgtgcgtccacgggcaaagctggaggcgtaaagggtgaactccgtcaccgcatagctccagttaaaacctggcggcgggattgtcaccgcctcgctggcgtcgcgcaataaggtaatatgtggatgaaacggacgattgctttgaaaacaaccgctgcgggcagcctgactacggagcatattcgccagctggattaagccgcgtggcggctgacgcatccctaaccacaccacacggctacgcagccattgtccggcgtcatcaagcgtgagtgtgaaaccaggttgacgaatccgtccggctaaaagagaaagcgccttctctttctcggcgctcacttcgcctaaaaatgccagagtcagatgcaaattatcggcggcgaccggacgtcccgcctcaggtgggaagtgtgtggcgcgccaatggataatctgttcgcggatttctgcaggtaagtcgatagcaaagaacagacgttgcggttcagacatgtgaggcactcggttatgaattaccgcgatgctacaatgtggcgcgaagaatgttaaccctctggagcgttttgtgagcagcttgcccgttgctgccgtcttacctgaattacttaccgctctcgattgtgcgccgcaggtattattaagtgcgccgaccggggccgggaaaagtacctggctgccgctgcaactgctggcgcatcccggcattaacgggaaaattatcctgctggagccgcgtcgtctggcggcgcgtaacgtcgcgcaacggctggcggagctgcttaacgaaaagccaggcgataccgttggctaccggatgcgtgcgcaaaactgcgtcgggccgaatacccgcctggaagtggttaccgaaggcgtgctgacgcgcatgatccagcgtgacccggaactgagcggtgttggactggtgatccttgatgaatttcatgagcgcagcttgcaggcggatttggcgttggcgctgttactcgatgtgcaacaaggtctgcgtgatgaccttaaactgctgattatgagcgctaccctggacaacgaccgcttgcagcaaatgctgccagaagcgcctgtcgtcatcagtgaagggcgcagctttccggttgaacgccgttatttaccgctgcccgcgcatcagcgttttgacgatgccgttgcggtagccaccgctgaaatgctgcgtcaggaaagcggaagtttactgttatttttacctggcgtcggagaaattcagcgtgtgcaggaacaactggctagccgcatcggcagtgatgtattgctctgcccgctgtatggcgcgttgagcctgaacgatcagcgaaaagcgatcctcccggcaccgcaagggatgcgcaaagtggtgctggcgaccaatattgctgaaaccagtttaaccattgaaggtattcgtctggtggtggattgtgcccaggagcgtgtggcgcgttttgatccgcgcacggggcttacgcgactgattactcaacgcgttagccaggcatccatgacgcagcgtgccgggcgcgccgggcgtctggagccgggtatcagcctgcatttaatcgccaaagaacaagcagaacgcgccgcggcgcaaagtgaaccggagatcttacaaagcgatctttccggtttgctgatggaattactgcaatggggatgcagcgatccggcgcagatgagctggctggatcaaccgccagtagtgaatctactggccgcgaaacgtctgttacaaatgctgggggcactggagggtgaacggcttagtgcgcaagggcaaaaaatggcagcgctgggtaacgatccgcgtttagcggcaatgctggttagcgcgaagaacgacgacgaagctgctaccgcggcaaaaattgccgccattctcgaagagccgccacggatgggcaatagtgacctgggcgtggcgtttagccgcaatcaaccagcctggcagcaacgtagtcagcaactgttaaaacgcttaaacgtacgtggcggtgaggcagacagtagccttatcgcgccgctacttgccggggcgtttgccgatcgcattgctcgtcgccgtgggcaagatggacgctatcaactggcaaacggcatgggagcgatgctcgatgccaacgacgcgctaagccgccacgaatggttgatcgcaccgttattattgcagggcagcgccagcccggatgcgcggattttactggcgctgctggtcgatattgatgagttagtacaacgctgcccgcagctggtacagcagtctgacactgtggagtgggatgacgcgcaaggtacgctgaaagcctggcgtcggctacaaatcggtcagttgacggtgaaagtgcagccgctggcgaaaccgagtgaagacgagttgcatcaggcgatgcttaatggcatccgtgataaaggtttaagcgtgctcaactggacggcggaagcggaacagctacgcttgcgtttgttatgcgccgcaaagtggttgccggaatatgactggccagcggttgatgatgaaagtttattggcagcgctggaaacgtggctgctgccacatatgactggcgtacatagtctacgcggcctgaaaagtctcgacatttatcaggcactacgcggattacttgattggggaatgcagcaacgtctggatagtgaattgcctgcgcattacactgtgccgacgggaagccggatcgccattcgttatcatgaagataacccgcccgcgctggcggtgagaatgcaagagatgtttggcgaggccaccaatccgacgatcgcccaggggcgcgtgccgctggtgctggagttgcttagtcctgcccaaaggccattacaaatcacacgagatttgagcgacttctggaaaggagcgtaccgtgaggtgcaaaaagagatgaaagggcgttatcccaaacatgtctggccggacgacccggcaaatactgcaccgacgcgacggacgaaaaagtatagctaaggttggttttctccctctccctgtgggagagggccggggtgagggcatcagcgcgcacgttcaccctcaccctaaccctctccctcaagggagaggggaccgatcgagcacaaattttgagagatatcttcttctgtcttgtaacagaagaacagaaaatcgggcttttgcgcctgaatattgcggagaaaaagcatggccgggaatgaccgcgagccaattggacgcaaagggaaaccgacgcgtccggtcaaacaaaaggtaagccgtcgtcgttacgaagatgacgatgattacgacgattatgatgactatgaggatgaagaaccgatgccgcgcaaaggtaagggcaaaggcaaagggcgtaagcctcgtggcaaacgcggctggctatggctactgctaaaactggctatcgtttttgccgtgctgatcgccatttacggcgtttatctcgatcaaaaaattcgtagccgtattgatggcaaggtctggcaactgcctgcggcagtttatggccgaatggtcaatcttgagccagacatgaccatcagcaagaacgagatggtgaagctgctggaggcgacccagtatcgtcaggtgagcaaaatgacccgtcctggcgaatttaccgtgcaggccaacagcattgagatgattcgccgtccgtttgatttcccggacagtaaagaaggacaggtgcgcgcgcgtctgacctttgatggcgatcatctggcgacgatcgtcaatatggagaacaaccgtcagttcggtttcttccgtcttgatccgcgtctgatcaccatgatctctagcccaaacggtgagcagcgtctgtttgtgccgcgcagtggtttcccggatttgctggtggatactttgctggcgacagaagaccgtcatttttacgagcatgatggaatcagtctctacagtatcggacgtgcggtgctggcaaacctgaccgccggacgcacggtacagggtgcgagtacgctgacgcaacagctggtgaaaaacctgttcctctccagcgagcgttcttactggcgtaaagcgaacgaagcttacatggcgctgatcatggacgcgcgttacagcaaagaccgtattcttgagctgtatatgaacgaggtgtatctcggtcagagcggcgacaacgaaatccgcggcttcccgctggcaagcttgtattactttggtcgcccggtagaagagctaagcctcgaccagcaggcgctgttagtcggtatggtgaaaggggcgtccatctacaacccgtggcgtaacccaaaactggcgctggagcgacgtaatctggtgctgcgtctgctgcaacagcaacagattattgatcaagaactctatgacatgttgagtgcccgtccgctgggggttcagccgcgcggtggggtgatctctcctcagccagcctttatgcaactggtgcgtcaggagctgcaggcaaaactgggcgataaggtaaaagatctctccggcgtgaagatcttcactacctttgacagcgtggcccaggacgcggcagaaaaagccgccgtggaaggcattccggcactgaagaaacagcgtaagttgagcgatcttgaaactgcgattgtggtcgtcgaccgctttagtggtgaagttcgtgcgatggtcggaggttctgagccgcagtttgcgggctacaaccgtgcgatgcaggcgcgtcgtagcattggttcccttgcaaaaccagcgacttatctgacggccttaagccagccgaaaatctatcgtctgaatacgtggattgcggatgcgccaattgcgctgcgtcagccgaatggccaggtctggagtccgcagaatgatgaccgtcgttatagcgaaagcggcagagtgatgctggtggatgcgttgacccgtagcatgaacgtgccgacggtaaatctggggatggcgctggggctgcctgcggttacggagacctggattaaactgggcgtaccgaaagatcagttgcatccggttccggcaatgctgctgggggcgttgaacttaacgccaatcgaagtggcgcaggcattccagaccatcgccagcggtggtaaccgtgcaccgctttctgcgctgcgtagcgtaatcgcggaagatggcaaagtgctgtatcagagcttcccgcaggcggaacgcgctgttccggcgcaggcggcgtatctgacactatggaccatgcagcaggtggtacaacgcggtacgggtcgtcagcttggggcgaaatacccgaacctgcatctggcagggaaaacagggactaccaacaataacgtagatacctggtttgcgggcattgacggcagcacggtgaccatcacctgggtcggccgtgataacaaccagccgaccaaactgtatggtgccagcggggcaatgagcatttatcagcgttatctggctaaccagacgccaacgccgctgaatcttgttccgccagaagatattgcagatatgggcgtggactacgacggcaactttgtttgcagcggtggcatgcgtatcttgccggtctggaccagcgatccgcaaagcctgtgccagcagagcgagatgcagcagcagccgagtggcaatccgtttgatcagtcttctcagccgcagcaacagccgcaacagcaacctgctcagcaagagcagaaagacagcgacggtgtagccggttggatcaaggatatgtttggtagtaattaacatctaagcgtgaaataccggatggcgagttgccatccggtaaaataacatcccatctaagatattaaccctttcttttcatctggttgtttattaacccttcaggaacgctcagattgcgtaccgcttgcctgtaagactcaatgtaagccgtgccaaaatatgatggctaggacgagctagaacccgccagcgtttcgaatattatcttatctttataataatcattctcgtttacgttatcattcactttacatcagagatataccattccatataacggccctgtacgcctggacggataaagcgtttacgcgacaacggatgcccgatgcgacgctggcgcgtcttatcgggcctacaaacggccccgaatcgtaggtcggataaggcgttcacgccgcatccgacaaaccatgctggatcacaacttcgcaaacacccgacgtgcagcatcgatggtgttattgatatcttccatgctgtgcgccacggacataaagcccgcttcaaacgcactcggtgccaggtaaacaccttcgtccagcatcatatggaagaaacgcttaaagcgttccacgtcacaggccatcacatcctgatagcacgtcacggactcggcgtcggtaaagaaaataccgaacatgccgccaacgtggttaacgaccagcggaattccggcttcttctgccgcttccagcagaccttctgccagacgtgttgtcagctcatccagcgtttcgtgaacgcccggctgcgcgacttcattcagacaggcgaaacccgctgccatcgcaatcgggttaccggaaagcgtacccgcctgatagaccggacccgtcggggccagcgcatccattacatcacgacgaccaccgaatgcgcctaccggcattccaccgccgatgattttgccgaggcaggttaaatctggcactacgccgtaataatcctgtgcgccagctagcgctacgcggaaaccggtcatcacttcatcgatgatcagcaacgcgccaaattcgtcgcacagcgcgcgcagacctggcaggaactctggcagcggcggaacacagttcatattgcctgccaccggctcgacgataatacaggcaatctcttgcgggtattgctcaaatgcggcgcgtacagaagccagatcattataagtacaggttaaggtatatttggcgaaatctgccggaacgcccgggctgtttggctggcctaacgtgagtgcgccagaaccggctttcaccagcaggcagtcagcgtgaccatggtaacacccttcaaatttaataattttgtcgcgaccggtaaaaccacgggccaggcggatggcgctcatggtcgcttcagtgccggagttcaccatgcgcaccatatccatggtcgggaccagttcggtcaccagttgcgccattttcacttccatttcggttggtgcaccaaagcttaaaccacgctcggcggcttcaatcacggcattgcggattgccggatggttatggcccagcaccatcggcccccaggaaccgacataatcgatataggctttgccatcaacatcgtacagataagcgccgtccgctttttcgataaacagtggagtgccgcccacgccagtaaaggcgcgaacaggggagttcacaccgccagggatcagctcgcgcgctgcgctgtaaagattttcagacttactcatggagggttcctgattcgtagaaaaagtgaatggctgctattctatgttattcataacaagttaaatactcgtcaaacatcaggctgcttgtactggtgcaatcctgatttcttagagtataaaagttttgtgcatttgaaacattacgctttgcaaaggattttcatggaacgtgcgagtaaaatgccgtcatcttatttgtatgaccaataagtgatcattggatgaaaactgatactccctctttagaaacaccgcaggccgcgcgcctgcgacgcagacaactgattcgccaacttcttgagcgcgataaaaccccgttagccattttgtttatggcggcagtcgtcggcacgcttgttgggctggcagcggttgcttttgacaaaggtgtcgcctggttgcagaaccaacgtatgggggcgctggtacatactgctgataattatccgcttctgttaaccgtcgcttttctctgtagcgcggtgctggcgatgtttggctactttttggtgcgcaaatacgcgccggaagcaggtggtagcgggatcccggaaattgaaggggcgctggaagatcaacgtcccgttcgctggtggcgtgtattgccggtgaagttctttggcgggctggggacactcggcggaggcatggtgttggggcgcgaagggccaaccgtgcagatcggcggtaacattggccgtatggtgcttgatattttccgcctgaaaggtgacgaagctcgccatacgctgctggcaaccggtgctgctgcggggctggctgcggcctttaacgcgccgctggcgggtattttgtttattatcgaagagatgcgtccgcagtttcgctatacgttaattagcattaaagcggtatttattggtgtcattatgagcaccattatgtaccggatttttaatcatgaagttgcgttgattgacgtcggtaaactttctgatgcgccgcttaatacgctgtggctttatctgatcctcggtattatttttggcattttcggccctatttttaataaatgggtgctggggatgcaggatttgctgcaccgtgtgcacggcggcaatattaccaaatgggtgctaatgggcggtgcgattggcggtctgtgtggattgctggggtttgtggcaccagcaacgagcggcggcggttttaacctgattcctatcgctaccgcggggaatttcagcatgggaatgctggtgtttatcttcgtcgcgcgggtcattaccaccttactctgcttctcttccggcgcgccgggcggtatttttgccccgatgctggcgctgggtactgtgctgggaaccgctttcggaatggttgccgttgagctgtttccgcaatatcaccttgaggcggggacgtttgctattgccggaatgggggcattactggcggcatctattcgcgcgccgttaacggggatcattctggttctggagatgaccgataactaccagctcattttgccaatgattattaccggtcttggcgcaacactattagcgcaatttaccggcgggaaaccgctatacagcgcgattcttgcgcgcacgctggcaaaacaggaagctgagcaactggcgcgaagcaaggccgcaagtgccagcgagaatacttgaacgaaataccagggtattagataatggcgattattattgggttagaatttgcccaattgccgatgtcgtttggagcaaaatatgagtgatgacgtagcactgccgctggagtttaccgacgcagcagccaacaaagttaaaagcctgatcgctgacgaagataacccgaatctgaaattacgcgtgtatatcaccggtggcggttgcagcggcttccagtatggtttcacctttgatgatcaggtgaacgaaggcgatatgaccatcgaaaaacagggcgttggcctggtggttgatccgatgagcctgcaatatctggtcggcggttccgttgattataccgaaggtctggaaggttctcgtttcatcgtgaccaacccgaacgcgaaaagcacctgcggttgcggttcttcctttagtatctaatctgttgttcatgtgccggataaactatccggcacatcttctctcttcaacgcccattctcatccagcgcaaacgtcggtagcttaagatgccaacgaatagccgccagccgaatcaatagcgtcacgaccatgcccatcatactggctgtttccagtggtacggaaaatgtgtaataagccgtagcgtggacaataccgccgataatacaggcagttgcgtagatttctgtacgtaaaatcatggggatttcgcgggccagaacatcacgaatgatcccgccgccaacgccagtaatgacgcccatacaaaccgcgattaacggaccggcttccgcattaaaggctttattcacgccaatgccgacaaacaccgccagaccaacggcgtccagcaccggcaacatccattttggtaagcgtcttggctggcgcaccagcacgatggtcagcatgctggtgaccattgcaacgaccagatcggtgggatctttcacccaaaataccgggccgtgatccagcgccatgtcgcgaattgtcccgccgcctactgcggttaccacgcccagtaccagaacaccaaaagggtccatacgcaattttccggctaacaaaacgccggagatggcaaataccgctgtgccgactatatccagccaatagacgagcattgttcaatccccactgagcacctgaaaaggtcaggcgttaatctacctgactaagcgcattacagagctgttgtgcagcgaggataatacgtgggcttgcacgttcaaaccagtcactcgtgagaggaataacgggaattttgagctgttcaccccagtattgtttgattttaggaatttggtccggtccgcctgtaatgacaatcgcctgtgggctgcgtgctaacacctgttcgcggctaacttgcggccagggaacccggctgtctttaaagatgttttctccgccacaaacttcgagtacctggttctgaatgctctcttttccactggtaaatggcggattaatgccgaattgcagaaaaacacgttttttaggtttatcagcatattgcgctttcaattgcgcgtactgatccagcagggattgcgcggcttgttcggccttgtctggttgcggactccagggggccagttgacgtaacgcattggcaatttgttcaatgcttgtcgcatcgacccacatcacttttattcccaggctagccagctggtcaacctgccgctcggcattacctccacgccaggcaatcaccagatcgggtttcagcgcgacaatgcgttccagattcatcccctgccaggtggaaacctgctcaatcttttgcgcttgtggaggatagtcggaatagctgctgaccccaaccggcgtgatcccggcggcaaaggcaagttcagtgttggcgggagaaagcgtgatgacgcgcggcgcggcgttgagccacagtggcgcaagaaaagacagggcgaccagcgccctgaacagactcttagccatgtgcaagtttctgcaccagactctcaaccatcaggctggactgtttagcggcaacagccaggaactcatcgaagctaagatgagactgttgatcggccacgtcggagatggcgcgtacgacaacaaacgggacgttgaaattgtggcagacatgggcgattgccgtcgcttccatctctacagcaatggcctgtgggaagttgtggcggattttcgccagaccaacagaaccgttgatgaaagcgtcgccgctaacaatcaggccacgtacagcgttaagattcagttcggcaatgcaggcctcagcggcagcgatcagtttatcgtcagctttaaagcctgccggacagcctggtaactgaccgtattcataaccaaatgccgtgacatccgcgtcgtgataacgtgcttcgtcgctgacaacgatatcgcccactttcaacgttggtgccaggccaccggcagaaccggtgttaataatcacatctggcttgcagtgttccaacagcaaagtggcacccagcgccgcagcgactttaccgatgccgcttttcagaagcgcaacctcggttccattcagttggccggtatagatttcgcaaccgccgagactgatagtttgacggttttcgattttgtcacgcagcagcgtaacttcttcttccattgcaccaatgatgccgattttcatagatttactcgcgataagcccgatttgaaggcatagtttaccatgcgcttacggggaagcgtatttctcacgcgggagaggacatggcacagattgatttccgaaaaaaaataaactggcatcgtcgttaccgtagtccgcagggcgttaaaaccgaacatgagatcctgcggatcttcgagagcgatcgcgggcgtatcatcaactctccggcaattcgtcgtctgcaacaaaagacccaggtttttccactggagcgcaatgccgccgtgcgcacgcgtcttacccacagcatggaagtccagcaggtggggcgctacatcgccaaagaaattttaagccgtctgaaagagcttaaattactggaagcatacggcctggatgaactgaccggtccctttgaaagcattgttgagatgagttgcctgatgcacgatatcggcaatccgccgtttggtcattttggcgaagcggcgataaatgactggtttcgccaacgtttgcacccggaagatgccgaaagccagcctctgactgacgatcgctgcagcgtggcggcactacgtttacgggacggggaagaaccgcttaacgagctgcggcgcaagattcgtcaggacttatgtcattttgaggggaatgcacaaggcattcgcctggtgcatacattgatgcggatgaatctcacctgggcacaggttggcggtattttaaaatatacccgtccggcgtggtggcgtggcgaaacgcctgagacacatcactatttaatgaaaaagccgggttattatctttctgaagaagcctatattgcccggttgcgtaaagaacttaatttggcgctttacagtcgttttccattaacgtggattatggaagctgccgacgacatctcctattgtgtggcagaccttgaagatgcggtagagaaaagaatatttaccgttgagcagctttatcatcatttgcacgaagcgtggggccagcatgagaaaggtagcctctttagcctggtggttgaaaatgcctgggaaaaaagtcgcagtaatagtttaagccgcagtacggaagatcagttttttatgtatttacgggtaaacaccctaaataaactggtaccctacgcggcacaacgatttattgataatctgcctgcgattttcgccggaacgtttaatcatgcattattggaagatgccagcgaatgcagcgatcttcttaagctatataaaaatgtcgctgtaaaacatgtgtttagccatccagatgtcgagcggcttgaattgcagggctatcgggtcattagcggattattagagatttatcgtcctttattaagcctgagcttaagtgactttactgaactggtagaaaaagaacgggtgaaacgtttccctattgaaagccgcttattccacaaactcagcacgcgccatcggctggcctatgtcgaggctgtcagtaaattaccgagtgattctcctgagtttccgctatgggaatattattaccgttgccgcctgctgcaggattatatcagcggtatgaccgacctctatgcgtgggatgaataccgacgtctgatggccgtagaacaataaccaggcttttgtaaagacgaacaataaatttttaccttttgcagaaactttagttcggaacttcaggctataaaacgaatctgaagaacacagcaattttgcgttatctgttaatcgagactgaaatacatgaaaaaaaccacattagcactgagtgcactggctctgagtttaggtttggcgttatctccgctctctgcaacggcggctgagacttctagtgcaacgacagcccagcagatgccaagccttgcaccgatgctcgaaaaggtgatgcctagtgtggtcagcattaacgtagaaggtagcacaaccgttaatacgccgcgtatgccgcgtaatttccagcagttcttcggtgatgattctccgttctgccaggaaggttctccgttccagagctctccgttctgccagggtggccagggcggtaatggtggcggccagcaacagaaattcatggcgctgggttccggcgtcatcattgatgccgataaaggctatgtcgtcaccaacaaccacgttgttgataacgcgacggtcattaaagttcaactgagcgatggccgtaagttcgacgcgaagatggttggcaaagatccgcgctctgatatcgcgctgatccaaatccagaacccgaaaaacctgaccgcaattaagatggcggattctgatgcactgcgcgtgggtgattacaccgtagcgattggtaacccgtttggtctgggcgagacggtaacttccgggattgtctctgcgctggggcgtagcggcctgaatgccgaaaactacgaaaacttcatccagaccgatgcagcgatcaaccgtggtaactccggtggtgcgctggttaacctgaacggcgaactgatcggtatcaacaccgcgatcctcgcaccggacggcggcaacatcggtatcggttttgctatcccgagtaacatggtgaaaaacctgaccagccagatggtggaatacggccaggtgaaacgcggtgagctgggtattatggggactgagctgaactccgaactggcgaaagcgatgaaagttgacgcccagcgcggtgctttcgtaagccaggttctgcctaattcctccgctgcaaaagcgggcattaaagcgggtgatgtgatcaccagtctgaacggtaagccgatcagcagctttgccgcactgcgtgctcaggtgggtactatgccggtaggcagcaaactgaccctgggcttactgcgcgacggtaagcaggttaacgtgaacctggaactgcagcagagcagccagaatcaggttgattccagctccatcttcaacggcattgaaggcgctgagatgagcaacaaaggcaaagatcagggcgtggtagtgaacaacgtgaaaacgggcactccggctgcgcagatcggcctgaagaaaggtgatgtgattattggcgcgaaccagcaggcagtgaaaaacatcgctgaactgcgtaaagttctcgacagcaaaccgtctgtgctggcactcaacattcagcgcggcgacagcaccatctacctgttaatgcagtaatctccctcaaccccttcctgaaaacgggaaggggttctccttacaatctgtgaacttcaccacaactccatacatcttcatcatcctttaggcatttgcacaatgccgtacgttacgtacttccttatgctaagccgtgcataacggaggacttatggctggctggcatcttgataccaaaatggcgcaggatatcgtggcacgtaccatgcgcatcatcgataccaatatcaacgtaatggatgcccgtgggcgaattatcggcagcggcgatcgtgagcgtattggtgaattgcacgaaggtgcattgctggtacttagtcagggacgagtcgtcgatatcgatgacgcggtagcacgtcatctgcacggtgtgcggcaggggattaatctaccgttacggctggaaggtgaaattgtcggcgtaattggcctgacaggtgaaccagagaatctgcgtaaatatggcgaactggtctgcatgacggctgaaatgatgctggaacagagccggttgatgcacttgttggcgcaggatagccgtttgcgggaagaactggtgatgaacctgattcaggcagaggagaatactcccgcacttactgaatgggcgcaacggctggggatcgatctcaatcaaccgcgagtggtggctattgttgaggtcgacagcggtcagcttggcgtggacagcgcaatggcggagttacaacaactgcaaaacgcgctgactacgcccgagcgtaataatctggtggcgattgtcagcctaaccgaaatggtggtgttgaaaccggcgttgaactcttttgggcgctgggatgcagaagatcatcgtaagcgagttgaacaactgattacccgcatgaaagagtacggccagctgcgttttcgcgttagtctgggcaactattttaccggtcctggcagtattgcccgatcctatcgtacggcgaaaacgacgatggtggtgggtaaacagcggatgccagaaagtcgctgctatttttatcaggatctgatgttacctgtgttactcgacagtttgcgtggcgactggcaggccaacgaactggcgcgaccgctggcgcggctgaaaacgatggacaataacggcttgctgcgacgaacgctggcggcgtggtttcgccacaatgtgcaaccgctggcaacgagtaaggcgttgtttattcatcgtaataccctggagtatcggcttaatcgtataagcgaactgaccgggcttgatttgggcaattttgatgacaggttgctgctgtatgtggcgttacaactggatgaagagcggtaagttatgcgttaaggttgaggcggcgctggctcattcccctcagcccgaagggtagaggggaatgcccgaattaaccgtcagttcgggattatttacgcgttagtttttccagatcggcttcaatctcgctgatcttattggttacgacactctccaggtgacgtaagtcgtcgaggatcttacgcttaagatcaacttcgctgcggtcacgctggcagatttgatcaagctcatcaatgatataccgtagattcgggctgatttcctggacttctttataaccctgacccacaccatcagcgacgaccgttttacgctgacgcggatatttaaacttaacgctcttggcgaaaaactcgcctttgtctttctggaaatagattttcagaatatcgttgttggcttcctgccggaggctgtaacgatcaatttcttcaggattggtaatacccagacttttcagattgtcgtacatagcgttacctcaaaatgagtcagtaaattgtgcttattttagcatttggcctggcccgcccggctcgactgtgatcgcagaaagcctttttcttccagacttctatcatggcgtaaaaatcaaaaaattacctgctttattctggtgataaaattcacgatttacaccagttccagcatcgttacttccgggcggcagttcagacgcaaaccatacaaactgcccacgccacgggttgtgtagatgtgtctttcgccaaaggcatttaatccggcgacgtaacgtttatcttcgacaggggcaaaaggttcaccaaccaacggtacgcgcagttgcccgccgtgagtatggccgcacagcatcagatcccagggttcatcacgcatgacttctttgctgtcgggattatgcgccagcaccagtcttggcagattggcttcgctggcgggaggcggtttgcattgtccggcccataagtcaccagtgcctaccagttcgaattgcctgttcggcgtggcgatcaccgtagcctggttaaacaacaccgtgatgcccgcacttttcaacgtctcgccaattaagtgatttttttctgtaccaacagggcgatcgtggttgccgaagcaggcaaacgtcggcgcacattcggcaaggggggagagtacgtcactaaacgcgctaaaattcaggctcatatcaaataatacgtaatcgccgcccagtaatatcaaatcgggcttttgttctatgccaagagcaatcgcgtcagaaatcaggcttaaaggaacaaaacgagagtaatggagatcggccagaaaaagaattttgaatggtgctgcgttgtctttaaaaaaggcgaggcggtgacggattaattcaaaccagcctggctcacagtaatgcatataaccgaaaccactgctcgtggctatcgtcgcggcagtagcctgcaaaaatcggcggcgactaatcatcgctcatccctgcaaaaaaatcgggcagcgtcgtgctgcccgtgtgcatacttttagtcgatggtacgcagcagttcgttaatgccgactttgccgcgagttttcgcgtcaactttcttaacgataaccgcacagtagaggctgtatttgccatctttactcggcagattaccactaacaaccacagaccccgccggaacgcgaccgtagtggatttcgccggtttcacggtcgtaaatacgggtgctctgaccaatgtatacgcccatggaaatgacggaaccttcttcgacaatcaccccttcaaccacttcagagcgcgcgccgatgaagcaattatcttcaatgatggttgggttagcctgcagcggttccagcacgccgccgatgcccacgccaccggaaaggtggacgtttttaccaatctgcgcacaagaaccgacggtcgcccaggtatcaaccatggtgccttcatcaacatatgcgccgatgttgacgtaagacggcatcagcacggtgttacgggcaataaacgcaccctgacgtaccgccgctggtggcacaacgcggaagccttctttctggaaacgtgcttcgtcgtagtcggcgaatttcatcggcactttgtcgaagtagcggctttctgccccttcgatcacctgattatcattaatacggaaagagagcagcaccgcttttttcaaccactgatgcgtcacccactgaccgtcaattttttccgctacacgcagtgcgccggaatccagcagggcgatcacctgatttaccgcttcgcgggtaacggtgtctgcattggctggcgtgatctcggcacggcgttcaaaagcggtttcaataatgttctgtaactgctgcattgttaaactcttttcatatcagtaaacacatcaccctttatcgtttggattgagggcctctgtcaaccgctgatgcacttcctgctgcaactcgttattaagcgcacgccggtcagcggtggcaattatgaataaatcttctactcgctcgccaatggttgtaattcgggcaccatgaaggctaattcccagatcggcaaaaattttcccgactcgcgccagcagtccaggttggtcgagggcgatcagttcgaggaagcttttgcggtcggtatgggtcggcaaaaacgttacttcggtttcaacagtaaaatggcgtaatttggcgggttggcgacggggctgcggtggctgccagctactttgcgtcagtacttgctccagaccaaaccgaataacctcatgacgatctgcggacagcgggttgccatcgggttccagcacgataaaggtatccatcgccataccgtcgcgagtggtgaaaatttgtgcgtcgtgaacacttaaattgcggcggtctaattcggcacagacggcggcaaacagataagggcggtccgggctccagataaaaatctcggtgcctccacgcgtagcctgcgggctaagcaataccagcggtttgcttaaatcatgctgtaataaatggcgggcatgccaggccagttgatttgggctatggcggacaaaatagttagcacgacagcgactccaaatttggtgcagcgcctcttcgtcgatgttatccatgcgcagtagtgccagtgcctggagttggtgatggcgaacccgttcgcgcatatccggcgtgttttgcattccgcgtcgtagctgcttttcggtggcaaagtagagctcacgcaacagactttgcttccagctattccacagcgtttcgttggtggcgcaaatgtcagccacagtcaggcataccagatagcgcagacgattttccgtttgcacttcttcggcaaactgcttgatgacttccgggtcctgaatatcgcggcgttgggcggtcacgctcatcaacaggtgctggcgaaccagccaggcgaccagctgtgtttcgcgactgttcagcccgtggagttcggcaaaatgcactacatcctgagcaccgagaatggagtggtcgccgccgcgtcctttggcgatatcgtgaaacagcgcggcgatgaaaatcagctcagtactcggcaggcgcggccagacgtccacacacaacggatggcgctggcgcgtttcttcactggcaaaactctccagtttcagcatcacgcggatagtatgttcatccaccgtgtaggcgtggaacagatcaaactgcatctgcccgacgatatggctccattgcggcatatacgcgccgagcacgctatggcgatgcattggcaatagcccgcgccgcaccgctccggggtgacgcagaatgctcaaaaacagttttcgtgcttccggaatattacacagcggttgttgcagatggcgacgggcatggcgtaactggcgcagcgtggtggagtaaatgccggtgatcgcactgttgtgcaccatggtgtagaacatacgcaagatggcttccggctggcgcataaatagtgtttcatcacgcaggtcgattagcgtaccgcgtagctgaaactcatcgtcgattggacgtggtttttcgtcggcgggaagggcgaggatggcttcatcgaacagttgcagcagcatctggttgagttcactgacgcggcgtgtaacgcggaagtaatccttcatcatccgctcgaccggttcgttaccttcaccactgtaattcagacgctgggcgacgctaagctggcgatcgaataacaggcgattatcgtaacggctgacgaccagatgcagggcaaagcgaatacgccacaatatatgcagacattcgtttaattccgcccgctccgcactggttaagaagccaaacccgaccatttcatccaggcttgttgcgccaaaatgacggcgggccacccattgcagagtgtggatatcgcgcaagccgccagggctgcttttgatgtctggttcaaggttgtagctggtgccatggtaacgctgatggcgctggttctgttcttcaactttcgccgcgtagaacttgtcggaaggccagaatccttcgctgaaaatatgtttttgcagttcgaggaacagcgcaacatcgccaattaataagcgggattcgattaaattggtggcgacggttaaatcgcttaacccttccagcatgcactcttcaagcgtgcgcacgctatgaccgacttccagctttacatcccagagcagcgttaacagctcgcccactttttgcgcctgatcgtccgggagctttttacggcttaaaatcagtaaatcgacgtcactaagtggatgcagctcgccacgaccgtagccaccgacggcgaccaatgccaggtcggcaatctggctgaatcccgcttcaatccataatcgttgcaggagctggtcgataaactcggtgcgcgcctcaatcaactgttctgcagagatcccattgtcaaaggcatcacccagccaacgctggaaagtatcgatatgggcttttatcccaccgacggttaattcatcacggggccagacgcatggattttgcggttgaccgggcagggtggggagagcggtgtttgcgtactgttctggaagggtattcattgtgcgccacccataagattaaattatcgcattaaaaaagccggcattcgccggcttcatcttattcgtcgtggctgattatcgccgggatggtgtcatccttgcgtagcgtcagaatttcgcagccgttatcagtcaccacaatagtatgctcatattgtgcagacaagctgcgatctttggtttttaccgtccagccatctttcatggtgcggatctcttttttacccgcgttgaccattggctcgatggtgaacgtcatcccaggtttcagtacgacgttggtttcacgggagtcatagtgcagcacctgcggttcttcatggaagccgcgaccaataccgtgtccgcaatattcacgaacgacggagaagccttctgcttcgacaaatttctgaatcgccgcaccgatttcgcgcagattaatgcctggttttaccatgcgtagcgccaggtacaggctttcttgcgtgatgcggcacagacgttcgcccatgatggtcggcttaccgacgataaacattttgctggtatcgccgtggaaaccatctttgattacggtgacatcaatgttaacgatatcgccatctttcagcagcttagcatcgtccgggataccgtggcacaccacttcattaatagagatgcaaacggatttcggatagccgtgatagccgaggcaggcagaaaccgcgtgttgttcattaacaatgtaatcattacagatgcgatccagctcgccggtgctgacgcccggtttaacatacggttcgatcatctccagcacttcggcagccagtcggccagcgacgcgcattttttcgatatcttctggggtcttgatagagatagccattaattctgtccatcagcgtcggtgataccgacaatatatatgtaagtgccgtcaatggtatcacacccgggcaaattgagaatcattctgaatttcgccaaacgtgccactgaaggttttctataatagaaaattcgacgtctgatgctgtacacagcgccaacaattattggtgtccacgacgtatttgtggtataaagcgcgccggacttccgatccatttcgtatacacagactggacggaagcgacaatctcactttgtgtaacaacacacacgtatcggcacatattccggggtgccctttggggtcggtaatatgggatacgtggaggcataaccccaacttttatatagaggttttaatcatggcaactgtttccatgcgcgacatgctcaaggctggtgttcacttcggtcaccagacccgttactggaacccgaaaatgaagccgttcatcttcggtgcgcgtaacaaagttcacatcatcaaccttgagaaaactgtaccgatgttcaacgaagctctggctgaactgaacaagattgcttctcgcaaaggtaaaatccttttcgttggtactaaacgcgctgcaagcgaagcggtgaaagacgctgctctgagctgcgaccagttcttcgtgaaccatcgctggctgggcggtatgctgactaactggaaaaccgttcgtcagtccatcaaacgtctgaaagacctggaaactcagtctcaggacggtactttcgacaagctgaccaagaaagaagcgctgatgcgcactcgtgagctggagaaactggaaaacagcctgggcggtatcaaagacatgggcggtctgccggacgctctgtttgtaatcgatgctgaccacgaacacattgctatcaaagaagcaaacaacctgggtattccggtatttgctatcgttgataccaactctgatccggacggtgttgacttcgttatcccgggtaacgacgacgcaatccgtgctgtgaccctgtacctgggcgctgttgctgcaaccgtacgtgaaggccgttctcaggatctggcttcccaggcggaagaaagcttcgtagaagctgagtaataaggcttgataactcccccaaaatagttcgagttgcagaaaggcggcaagctcgagaattcccgggagcttacatcagtaagtgaccgggatgagcgagcgaagataacgcatctgcggcgcgaaatatgaagggggagagcccttatagaccaggtagtacacgtttggttagggggcctgcatatggccccctttttcacttttatatctgtgcggtttaatgccgggcagatcacatctccgaggattttagaatggctgaaattaccgcatccctggtaaaagagctgcgtgagcgtactggcgcaggcatgatggattgcaaaaaagcactgactgaagctaacggcgacatcgagctggcaatcgaaaacatgcgtaagtccggtgctattaaagcagcgaaaaaagcaggcaacgttgctgctgacggcgtgatcaaaaccaaaatcgacggcaactacggcatcattctggaagttaactgccagactgacttcgttgcaaaagacgctggtttccaggcgttcgcagacaaagttctggacgcagctgttgctggcaaaatcactgacgttgaagttctgaaagcacagttcgaagaagaacgtgttgcgctggtagcgaaaattggtgaaaacatcaacattcgccgcgttgctgcgctggaaggcgacgttctgggttcttatcagcacggtgcgcgtatcggcgttctggttgctgctaaaggcgctgacgaagagctggttaaacacatcgctatgcacgttgctgcaagcaagccagaattcatcaaaccggaagacgtatccgctgaagtggtagaaaaagaataccaggtacagctggatatcgcgatgcagtctggtaagccgaaagaaatcgcagagaaaatggttgaaggccgcatgaagaaattcaccggcgaagtttctctgaccggtcagccgttcgttatggaaccaagcaaaactgttggtcagctgctgaaagagcataacgctgaagtgactggcttcatccgcttcgaagtgggtgaaggcatcgagaaagttgagactgactttgcagcagaagttgctgcgatgtccaagcagtcttaattatcaaaaaggagccgcctgagggcggcttctttttgtgcccatcttgtaaattcagctaacccttgtggggctgcgctgaaaagcgacgtacaatgtcgctagtattaattcatttcaatcgttgacagtctcaggaaagaaacatggctaccaatgcaaaacccgtctataaacgcattctgcttaagttgagtggcgaagctctgcagggcactgaaggcttcggtattgatgcaagcatactggatcgtatggctcaggaaatcaaagaactggttgaactgggtattcaggttggtgtggtgattggtgggggtaacctgttccgtggcgctggtctggcgaaagcgggtatgaaccgcgttgtgggcgaccacatggggatgctggcgaccgtaatgaacggcctggcaatgcgtgatgcactgcaccgcgcctatgtgaacgctcgtctgatgtccgctattccattgaatggcgtgtgcgacagctacagctgggcagaagctatcagcctgttgcgcaacaaccgtgtggtgatcctctccgccggtacaggtaacccgttctttaccaccgacagtgcagcttgcctgcgtggtatcgaaattgaagccgatgtggtgctgaaagcaaccaaagttgacggcgtgtttaccgctgatccggcgaaagatccaaccgcaaccatgtacgagcaactgacttacagcgaagtgctggaaaaagagctgaaagtcatggacctggcggccttcacgctggctcgtgaccataaattaccgattcgtgttttcaatatgaacaaaccgggtgcgctgcgccgtgtggtaatgggtgaaaaagaagggactttaatcacggaataattcccgtgatggataaataagggtaagattccgcgtaagtatcgcgggggcgtaagtctggttataaggcgttattgttgcaggcagtttggtcacggccagcgcgcagcaaccggagcgtacaaaagtacgtgaggatggcgagcactgcccggggccaaaatggcaaataaaatagcctaataatccagacgattacccgtaatatgtttaatcagggctatacttagcacacttccactgtgtgtgactgtctggtctgactgagacaagttttcaaggattcgtaacgtgattagcgatatcagaaaagatgctgaagtacgcatggacaaatgcgtagaagcgttcaaaacccaaatcagcaaaatacgcacgggtcgtgcttctcccagcctgctggatggcattgtcgtggaatattacggcacgccgacgccgctgcgtcagctggcaagcgtaacggtagaagattcccgtacactgaaaatcaacgtgtttgatcgtagtatgtctccggccgttgaaaaagcgattatggcgtccgatcttggcctgaacccgaactctgcgggtagcgacatccgtgttccgctgccgccgctgacggaagaacgtcgtaaagatctgaccaaaatcgttcgtggtgaagcagaacaagcgcgtgttgcagtacgtaacgtgcgtcgtgacgcgaacgacaaagtgaaagcactgttgaaagataaagagatcagcgaagacgacgatcgccgttctcaggacgatgtacagaaactgactgatgctgcaatcaagaaaattgaagcggcgctggcagacaaagaagcagaactgatgcagttctgatttcttgaacgacaaaaacgccgctcagtagatccttgcggatcggctggcggcgttttgctttttattctgtctcaactctggatgtttcatgaagcaactcaccattctgggcagcaccggcagcattggttgcagcacgctggacgtggtgcgccataatcccgaacacttccgcgtagttgcgctggtggcaggcaaaaatgtcactcgcatggtagaacagtgcctggaattctctccccgctatgccgtaatggacgatgaagcgagtgcgaaacttcttaaaacgatgctacagcaacagggtagccgcaccgaagtcttaagtgggcaacaagccgcttgcgatatggcagcgcttgaggatgttgatcaggtgatggcagccattgttggcgctgctgggctgttacctacgcttgctgcgatccgcgcgggtaaaaccattttgctggccaataaagaaagtctggttacctgcggacgtctgtttatggacgccgtaaagcagagcaaagcgcaattgttaccggtcgatagcgaacataacgccatttttcagagtttaccgcaacctatccagcataatctgggatacgctgaccttgagcaaaatggcgtggtgtccattttacttaccgggtctggtggccctttccgtgagacgccattgcgcgatttggcaacaatgacgccggatcaagcctgccgtcatccgaactggagcatggggcgtaaaatttctgtcgatagcgctaccatgatgaacaaaggtctggaatacattgaagcgcgttggctgtttaacgccagcgccagccagatggaagtgctgattcacccgcagagtgtgattcacagtatggtgcgctatcaggacggcagtgttctggcgcagctgggggaaccggatatgcgtacgccaattgcccacaccatggcatggccgaatcgcgtgaactctggcgtgaagccgctcgatttttgcaaactaagtgcgttgacatttgccgcaccggattatgatcgttatccatgcctgaaactggcgatggaggcgttcgaacaaggccaggcagcgacgacagcattgaatgccgcaaacgaaatcaccgttgctgcttttcttgcgcaacaaatccgctttacggatatcgctgcgttgaatttatccgtactggaaaaaatggatatgcgcgaaccacaatgtgtggacgatgtgttatctgttgatgcgaacgcgcgtgaagtcgccagaaaagaggtgatgcgtctcgcaagctgaggataatccggctacagagagtcgcgctatttgttagcgtagggcttcagtgatatagtctgcgccatctgatcgtaagtagttggctttataaggtcagatatgccgtggttttacacggcttttttttgtataggcttcagtattcctgagtaccgtaaaccctgtcagggaataaaaaacgcgtgatgttgtctgctactcaaccacttagcgaaaaattgccagcgcatggctgccgtcatgttgcgatcattatggacggcaatggccgctgggcaaaaaagcaagggaagattcgtgcctttgggcataaagccggggcaaaatccgtccgccgggctgtctcttttgcggccaacaacggtattgaggcgttaacgctgtatgcctttagtagtgaaaactggaaccgaccagcgcaggaagtcagtgcgttaatggaactgtttgtgtgggcgctcgatagcgaagtaaaaagtctgcaccgacataacgtgcgtctgcgtattattggcgataccagtcgctttaacagccgtttgcaagaacgtattcgtaaatctgaagcgctaacagccgggaataccggtctgacgctgaatattgcggcgaactacggtggacgttgggatatagtccagggagtcaggcaactggctgaaaaggtgcagcaaggaaacctgcaaccagatcagatagatgaagagatgctaaaccagcatgtctgtatgcatgaactggcccctgtagatttagtaattaggactgggggggagcatcgcattagtaactttttgctttggcaaattgcctatgccgaactttactttacagatgttctctggcccgatttcgatgaacaagactttgaaggggcgttaaatgcctttgctaatcgagagcgtcgtttcggcggcaccgagcccggtgatgaaacagcctgatgggggtcgcttttgctgaagtatcgcctgatatctgcttttgtgttaatacccgtcgtcatcgcggcgttgtttctgttgccgccggtggggttcgccattgtaacgctggtggtctgcatgctggcagcgtgggaatggggacagcttagcggttttaccactcgtagccagcgagtatggttggcggtgttatgcgggttattgttggcgctgatgctttttctgttgccggaatatcaccgaaatattcatcaaccgctggttgaaatcagtctttgggctagcctgggttggtggattgtcgcgctattgctggtgctgttttacccaggttccgcagcaatctggcgtaactctaaaacattgcgccttatttttggcgtgctaaccattgttcccttcttctggggcatgctggcgttacgggcctggcactatgacgagaatcattacagtggcgcaatatggttgctctatgtcatgatcctggtatggggcgctgactccggcgcatatatgtttggcaaattgtttggtaaacataagctggcaccgaaggtttctccgggtaaaacctggcaaggctttatcggtggactcgctactgcagcggtaatcagttggggttatggcatgtgggcgaatctcgacgtcgctcccgtcaccttactcatttgctctattgtcgcagcgttagccagtgtgctcggcgatctgaccgagagtatgtttaagcgtgaagcaggaattaaggacagcggtcatttaattccaggacacggtggtattttagatcgtattgatagcctgacggctgcggtaccggtctttgcttgcttgttgttactggtattcaggacgctttaacggaaggtaatatgctgagttttctctgggatttggctagcttcatcgttgcactgggtgtacttatcaccgtgcatgaatttggtcatttctgggttgcccggcgttgtggtgttcgcgttgagcgtttcagtatagggtttggtaaggcgctctggcggcgaactgataagctcggcaccgaatatgttatcgccctgatcccgttgggcggttatgtcaaaatgctggatgagcgcgcagaaccggtcgttccggaactccgccaccatgccttcaataataaatctgtcggccaacgagcggcgattattgccgcaggtccggttgcaaacttcatttttgctatctttgcctactggctggtttttattattggtgtgcctggcgtacgtccggtggttggcgaaatagcagccaatagcatagctgcggaagcacaaattgcaccaggtacggaactaaaagccgtagatggtatcgaaacgcctgattgggatgccgtgcgtttgcagttggtcgataaaattggcgatgaaagcaccaccattacagtagcgccatttggcagcgaccaacggcgggatgtaaagctcgatttacgtcactgggcgtttgagcctgataaagaagatccggtatctagcctggggattcgtcctcgtgggccgcaaattgaacctgtactggaaaatgtgcagccaaacagcgcggcaagcaaggcaggtttgcaagcaggcgacaggatcgttaaagtcgatggtcagcccttaacgcagtgggtgacctttgtgatgcttgtccgggataacccgggtaaatccttagcgttagaaatcgaaaggcaggggagtcccttgtctttgacattaatcccggagagtaaaccgggtaatggtaaagcgattggttttgtcggtattgagccgaaagtcattcctttgccagatgagtataaagttgtacgccagtatgggccgttcaacgccatcgtcgaagccacggacaaaacgtggcagctgatgaagctgacggtcagtatgctgggaaaattgatcaccggtgatgtgaaactgaacaacctcagtgggccgatctctatcgccaagggggctgggatgacagcggaactcggggttgtttattacctgccgtttcttgcgcttattagcgtgaacttagggataattaacctgtttccgttgcccgtacttgacggggggcatctgctgttccttgcgatcgaaaagatcaagggcggaccggtatccgagcgggttcaagacttttgttatcgcattggcagcattctgctggtgctgttaatggggcttgcacttttcaatgatttctctcggttatgagagttagttaggaagaacgcataataacgatggcgatgaaaaagttgctcatagcgagcctgctgtttagcagcgccaccgtatacggtgctgaagggttcgtagtgaaagatattcatttcgaaggccttcagcgtgtcgccgttggtgcggccctcctcagtatgccggtgcgcacaggcgacacggttaatgatgaagatatcagtaataccattcgcgctctgtttgctaccggcaactttgaggatgttcgcgtccttcgtgatggtgatacccttctggttcaggtaaaagaacgtccgaccattgccagcattactttctccggtaacaaaagcgtgaaagatgacatgctgaagcaaaacctcgaggcttctggtgtgcgtgtgggcgaatccctcgatcgcaccaccattgccgatatcgagaaaggtctggaagacttctactacagcgtcggtaaatatagcgccagcgtaaaagctgtcgtgaccccgctgccgcgcaaccgtgttgacctaaaactggtgttccaggaaggtgtgagtgctgaaatccagcaaattaacattgttggtaaccatgctttcaccaccgacgaactgatctctcatttccaactgcgtgacgaagtgccgtggtggaacgtggtaggcgatcgtaaataccagaaacagaaactggcgggcgaccttgaaaccctgcgcagctactatctggatcgcggttatgcccgtttcaacatcgactctacccaggtcagtctgacgccagataaaaaaggtatttacgtcacggtgaacatcaccgaaggcgatcagtacaagctttctggcgttgaagtgagcggcaaccttgccgggcactccgctgaaattgagcagctgactaagatcgagccgggtgagctgtataacggcaccaaagtgaccaagatggaagatgacatcaaaaagcttctcggtcgctatggttatgcctatccgcgcgtacagagcatgcccgaaattaacgatgccgacaaaaccgttaaattacgtgtgaacgttgatgcgggtaaccgtttctacgtgcgtaagatccgttttgaaggtaacgataccagcaaagatgccgtcctgcgtcgcgaaatgcgtcagatggaaggtgcatggctggggagcgatctggtcgatcagggtaaggagcgtctgaatcgtctgggcttctttgaaactgtcgataccgatacccaacgtgttccgggtagcccggaccaggttgatgtcgtctacaaggtaaaagagcgcaacaccggtagcttcaactttggtattggttacggtactgaaagtggcgtgagcttccaggctggtgtgcagcaggataactggttaggtacaggttatgctgttggtatcaacgggaccaaaaacgattaccagacctatgctgaactgagcgtaaccaacccgtacttcaccgtagatggcgtaagcctcggtggtcgtctcttctataatgacttccaggcagatgacgccgacctgtccgactataccaacaagagttatggtacagacgtgacgttgggcttcccgattaacgaatataacagcctgcgtgcaggtctgggttatgtacataactccctgtccaacatgcagcctcaggttgcgatgtggcgttatctgtactctatgggtgaacatccgagcacctctgatcaggataacagcttcaaaacggacgacttcacgttcaactatggttggacctataacaagcttgaccgtggttacttcccgacagatggtagtcgtgtcaacctgaccggtaaagtgaccattcctggaagcgataacgaatactacaaagtgacgttagacacggcgacttatgtgccgatcgatgacgatcacaaatgggttgttctggggcgtacccgctggggttatggtgatggtttaggcggcaaagagatgccgttctacgagaacttctatgccggtggttccagcaccgtgcgtggcttccagtccaataccattggtccgaaagcagtttacttcccgcatcaggccagtaattatgatccggactatgattacgaatgtgcgactcaggacggcgcgaaagacctgtgtaaaagcgatgatgctgtaggcggtaacgccatggcggttgccagcctcgagttcatcaccccgacgccgtttattagcgataagtatgctaacagcgttcgtacttccttcttctgggatatgggtaccgtttgggatacaaactgggattccagccaatattctggatatccggactatagtgatccaagcaatatccgtatgtctgcgggtatcgcattacaatggatgtccccattggggccgttggtgttctcctacgcccagccgttcaaaaagtacgatggagacaaggcagaacagttccagtttaacatcggtaaaacctggtaagtgttctccacaaaggaatgtagtggtagtgtagcgatgactttaggcgatcaatataagatcgccgggccacgcaaagaactgcaccctccggtgcaaatgggatggtaaggagtttattgtgaaaaagtggttattagctgcaggtctcggtttagcactggcaacttctgctcaggcggctgacaaaattgcaatcgtcaacatgggcagcctgttccagcaggtagcgcagaaaaccggtgtttctaacacgctggaaaatgagttcaaaggccgtgccagcgaactgcagcgtatggaaaccgatctgcaggctaaaatgaaaaagctgcagtccatgaaagcgggcagcgatcgcactaagctggaaaaagacgtgatggctcagcgccagacttttgctcagaaagcgcaggcttttgagcaggatcgcgcacgtcgttccaacgaagaacgcggcaaactggttactcgtatccagactgctgtgaaatccgttgccaacagccaggatatcgatctggttgttgatgcaaacgccgttgcttacaacagcagcgatgtaaaagacatcactgccgacgtactgaaacaggttaaataagtaatgcctagtattcgactggctgatttagcgcagcagttggatgcagaactacacggtgatggcgatatcgtcatcaccggcgttgcgtccatgcaatctgcacaaacaggtcacattacgttcatggttaacccaaaataccgtgagcatttaggcttgtgccaggcgtccgcggttgtcatgacccaggacgatcttcctttcgcgaaaagtgccgcactggtagtgaagaatccctacctgacttacgcgcgcatggcgcaaattttagataccacgccgcagcccgcgcagaacattgcacccagtgcggtgatcgacgcgacggcgaagctgggtaacaacgtaagcattggcgctaacgcggtgattgagtccggcgttgaactgggcgataacgtgattatcggtgccggttgcttcgtaggtaaaaacagcaaaatcggtgcaggtagccgtctctgggcgaacgtaaccatttaccatgagatccagatcggtcagaattgcctgatccagtccggaacagtggtaggcgcagacggctttggttatgccaacgatcgtggtaactgggtgaagatcccacagattggtcgcgtaattattggcgatcgcgtggagatcggtgcctgcacaaccatcgatcgcggcgcgctggatgacactattattggcaatggcgtgatcattgataaccagtgccagattgcacataacgtcgtgattggcgacaatacggcggttgccggtggcgtcattatggcgggcagcctgaaaattggtcgttactgcatgatcggcggagccagcgtaatcaacgggcatatggaaatatgcgacaaagtgacggttacgggcatgggtatggtgatgcgtcccatcactgaaccaggcgtctattccagtggcattccgctgcaacccaacaaagtctggcgcaaaaccgctgcactggtgatgaacattgatgacatgagcaagcgtctgaaaagccttgagcgcaaggttaatcaacaagactaacgttccatcttttgttcgccaaactttacggcctgtctcattcttacgattgcggcaggccgtgttattattgtcgtttcttatattttgacaggaagagtatcttgactactaacactcatactctgcagattgaagagattttagaacttctgccgcaccgtttcccgttcttactggtggatcgcgtgctggattttgaagaaggtcgttttctgcgcgcagtaaaaaatgtctctgtcaatgagccattcttccagggccatttccctggaaaaccgattttcccgggtgtgctgattctggaagcaatggcacaggcaacaggtattctggcgtttaaaagcgtaggaaaactggaaccgggtgagctgtactacttcgctggtattgacgaagcgcgcttcaagcgcccggtcgtgcctggcgatcaaatgatcatggaagtcactttcgaaaaaacgcgccgcggcctgacccgttttaaaggggttgctctggtcgatggtaaagtagtttgcgaagcaacgatgatgtgtgctcgtagccgggaggcctgatacgtgattgataaatccgcctttgtgcatccaaccgccattgtggaagagggcgcgagtattggcgcgaacgcacacattggtcctttttgtatcgttggaccccatgtcgaaattggtgagggtaccgtactgaaatctcacgttgtcgtgaatggtcatactaaaattggccgcgataatgagatttatcagttcgcctccatcggcgaagttaaccaggatctgaaatatgctggcgaaccgacccgtgtggaaatcggcgatcgtaaccgcattcgcgaaagcgtcaccattcatcgtggcacagtccagggcggtggattgacgaaggtgggcagcgacaacttactgatgatcaacgcgcacattgcgcacgattgtacggtaggtaaccgctgtattctcgccaacaacgcaacgctggcgggtcacgtaagcgttgacgacttcgcgatcatcggcggcatgaccgcagtccatcagttctgcatcattggtgcgcacgtgatggttggcggctgctccggtgtggcgcaggacgtccctccttatgtcattgcgcagggtaaccacgcaacgccgttcggtgtcaatatcgaagggctgaagcgccgcggattcagccgtgaggcgattaccgctatccgcaatgcgtataagctgatttatcgtagcggtaaaacgctcgatgaagtgaaaccggaaattgctgaactggcggaaacatatccggaagtgaaagcctttaccgatttctttgcacgcagtacgcgcggtctgattcgttaatgactgaacagcgtccattaacgattgccctggtcgccggagaaacctccggcgatatcctgggggccggtttaatccgcgctctgaaagaacatgtgcccaacgcccgctttgttggtgttgccgggccacgaatgcaggctgaaggctgcgaagcctggtacgaaatggaagaactggcggtgatgggcattgttgaagtgctcggtcgtctgcgtcgcttactgcatattcgtgccgatctgacaaagcgttttggcgaactgaagccagatgtttttgttggtattgatgcgcctgacttcaatattactcttgaaggtaacctcaaaaagcagggtatcaaaaccattcattacgtcagtccgagtgtctgggcgtggcgacagaaacgtgttttcaaaataggcagagccaccgatctggtgctcgcatttctgcctttcgaaaaagcgttttatgacaaatacaacgtaccgtgccgctttatcggtcataccatggctgatgccatgccattagatccagataaaaatgccgcccgtgatgtgctggggatccctcacgatgcccactgcctggcgttgctaccggggagccgtggtgcagaagttgaaatgcttagtgccgatttcctgaaaacggcccagcttttgcgccagacatatccggatctcgaaatcgtggtgccactggtgaatgccaaacgccgcgagcagtttgaacgcatcaaagctgaagtcgcgccagaccttagtgttcatttgctggatgggatgggccgtgaggcgatggtcgccagcgatgcggcgctactggcgagcggtacggcagccctggagtgtatgctggcgaaatgcccgatggtggtgggatatcgcatgaagccttttaccttctggttggcgaagcggctggtgaaaactgattatgtcagcctgccaaatctgctggcgggcagagagttagtcaaagaattattgcaggaagagtgtgagccgcaaaaactggctgcggcgctgttaccgctgttggcgaacgggaaaaccagccacgcgatgcacgataccttccgtgaactgcatcagcagatccgctgcaatgccgatgagcaggcggcacaagccgttctggagttagcacaatgatcgaatttgtttatccgcacacgcagctggttgcgggtgtggatgaagtcggacgcgggccgttagttggcgcggtcgtcaccgctgcggtgatccttgacccggcgcgcccgattgccgggctgaatgattccaaaaagctgagcgaaaaacgccgtctggcgctctatgaagagatcaaagagaaagcgttgagctggagtctgggccgcgcggaaccccacgaaatcgacgagctgaacattcttcatgcgaccatgctggcgatgcagcgtgccgtcgctgggctgcatattgcgccggaatatgtgttgattgatggtaaccgctgcccgaaattaccgatgcctgcgatggctgtggtgaaaggcgatagccgcgtaccggaaatcagtgccgcgtctatcctggcgaaagtgacgcgtgacgccgaaatggcggcgctggatattgttttcccgcaatatggttttgcccaacacaaagggtacccaaccgcttttcatctggaaaaactggctgaacacggcgcgaccgaacaccatcggcgcagctttgggcctgtcaaacgcgcactgggacttgcgtcctgattcttgtgtcgagattaagtaaaccggaatctgaagatgtctgaaccacgtttcgtacacctgcgggtgcacagcgactacagcatgatcgatggcctggccaaaaccgcaccgttggtaaaaaaggcggcggcgttgggtatgccagcactggcgatcaccgatttcaccaacctttgtggtctggtgaagttctacggagcgggacatggcgcagggattaagcctatcgtcggggcagattttaacgtccagtgcgacctgctgggtgatgagttaacccacctgacggtactggcggcgaacaataccggctatcagaatctgacgttgctgatcagtaaagcgtatcagcgcgggtacggtgccgccgggccgatcatcgatcgcgactggcttatcgaattaaacgaagggttgatccttctttccggcggacgcatgggcgacgtcggacgcagtcttttgcgtggtaacagcgcgctggtagatgagtgtgtcgcgttttatgaagaacacttcccggatcgctattttctcgagctgatccgcaccggcaggccggatgaagaaagctatctgcacgcggcggtggaactggcggaagcgcgcggtttgcccgtcgtggcgaccaacgacgtgcgctttatcgacagcagcgactttgacgcacacgaaatccgcgtcgcgatccacgacggctttaccctcgacgatcctaaacgcccgcgtaactatagcccgcagcaatatatgcgtagcgaagaggagatgtgtgagctgtttgccgacatccccgaagcccttgccaacaccgttgagatcgccaaacgctgtaacgtaaccgtgcgtcttggtgaatacttcctgccgcagttcccgaccggggacatgagcaccgaagattatctggtcaagcgtgcaaaagagggcctggaagagcgtctggcctttttattccctgatgaggaagaacgtcttaagcgccgcccggaatatgacgaacgtctggagactgaacttcaggttatcaaccagatgggcttcccgggctacttcctcatcgttatggaatttatccagtggagcaaagataacggcgtaccggtagggccaggccgtggctccggtgcgggtagtctggtggcctacgcgctgaaaatcaccgacctcgatccgctggaatttgacctgctgttcgaacgtttccttaacccggaacgtgtctccatgcctgacttcgacgttgacttctgtatggagaaacgcgatcaggttatcgagcacgtagcggacatgtacggtcgtgatgcggtaagccagatcatcaccttcggtacaatggcggcgaaagcggtgatccgcgacgtaggccgcgtgctggggcatccgtacggctttgtcgatcgtatcagcaaactgatcccgcccgatccggggatgacgctggcgaaagcgtttgaagccgagccgcagctgccggaaatctacgaagcggatgaagaagttaaggcgctgatcgacatggcgcgcaaactggaaggggtcacccgtaacgccggtaagcacgccggtggggtggttatcgcgccgaccaaaattaccgattttgcgccgctttactgcgatgaagagggcaaacatccggtcacccagtttgataaaagcgacgttgaatacgccggactggtgaagttcgacttccttggtttgcgtacgctcaccatcatcaactgggcgctggagatgatcaacaagcggcgggcgaagaatggcgagccgccgctggatatcgctgcgatcccgctggatgataagaaaagcttcgacatgctgcaacgcagcgaaaccacggcggtattccagcttgaaagccgcggcatgaaggacctgatcaagcgtctacaacctgactgcttcgaagatatgatcgccctagtggcactgttccgccccggtccgttgcaaagtgggatggtggataactttatcgaccgtaaacatggtcgtgaagagatctcctatccggacgtacagtggcagcatgaaagcctgaaaccggtactggagccaacctacggcattatcctgtatcaggaacaggtcatgcagattgcgcaggtgctttctggttataccctcggtggcgcggatatgctgcgtcgtgcgatgggtaagaaaaagccggaagagatggctaagcaacgttctgtatttgctgaaggtgcagaaaagaacggaatcaacgctgaactggcgatgaaaatcttcgacctggtggagaaattcgctggttacggatttaacaaaagccactctgcggcctatgctttggtgagttatcaagcgttatggctgaaagcgcactatcctgcggagtttatggcggcggtaatgaccgccgatatggacaacaccgagaaggtggtgggtctggtggatgagtgctggcggatggggctgaaaatcctgccaccagatataaactccggtctttaccatttccacgtcaacgacgacggcgaaatcgtgtatggtattggcgcgatcaaaggggtcggtgaaggtccgattgaggccatcatcgaagcccgtaataaaggcggctacttccgcgaactgtttgatctctgcgcccgtaccgacaccaaaaagttgaaccgtcgcgtgctggaaaaactgatcatgtccggggcgtttgaccgtcttgggccacatcgcgcagcgctgatgaacagcctgggcgatgcgttaaaagcggcagatcaacacgcgaaagcggaagctatcggtcaggccgatatgttcggcgtgctggccgaagagccggaacaaattgaacaatcctacgccagctgccaaccgtggccggagcaggtggtattagatggggaacgtgaaacgttaggcctgtacctgaccggacaccctatcaaccagtatttaaaagagattgagcgttatgtcggaggcgtaaggctgaaagacatgcacccgacagaacgtggtaaagtcatcacggctgcggggctcgttgttgccgcgcgggttatggtcaccaagcgcggcaatcgtatcggtatctgcacgctggatgaccgttccgggcggctggaagtgatgttgtttactgacgccctggataaataccagcaattgctggaaaaagaccgcatacttatcgtcagcggacaggtcagctttgatgacttcagcggtgggcttaaaatgaccgctcgcgaagtgatggatattgacgaagcccgggaaaaatatgctcgcgggcttgctatcagcctgacggacaggcaaattgatgaccagcttttaaaccgactccgtcagtctctggaaccccaccgctctgggacaattccagtacatctctactatcagagggcggatgcacgcgcgcggttgcgttttggcgcgacgtggcgtgtctctccgagcgatcgtttattaaacgatctccgtggcctcattggtagcgagcaggtggaactggagtttgactaatacaggaatactatgagtctgaatttccttgattttgaacagccgattgcagagctggaagcgaaaatcgattctctgactgcggttagccgtcaggatgagaaactggatattaacatcgatgaagaagtgcatcgtctgcgtgaaaaaagcgtagaactgacacgtaaaatcttcgccgatctcggtgcatggcagattgcgcaactggcacgccatccacagcgtccttataccctggattacgttcgcctggcatttgatgaatttgacgaactggctggcgaccgcgcgtatgcagacgataaagctatcgtcggtggtatcgcccgtctcgatggtcgtccggtgatgatcattggtcatcaaaaaggtcgtgaaaccaaagaaaaaattcgccgtaactttggtatgccagcgccagaaggttaccgcaaagcactgcgtctgatgcaaatggctgaacgctttaagatgcctatcatcacctttatcgacaccccgggggcttatcctggcgtgggcgcagaagagcgtggtcagtctgaagccattgcacgcaacctgcgtgaaatgtctcgcctcggcgtaccggtagtttgtacggttatcggtgaaggtggttctggcggtgcgctggcgattggcgtgggcgataaagtgaatatgctgcaatacagcacctattccgttatcagcccggaaggttgtgcgtccattctgtggaagagcgccgacaaagcgccgctggcggctgaagcgatgggtatcattgctccgcgtctgaaagaactgaaactgatcgactccatcatcccggaaccactgggtggtgctcaccgtaacccggaagcgatggcggcaagcttgaaagcgcaactgctggcggatctggccgatctcgacgtgttaagcactgaagatttaaaaaatcgtcgttatcagcgcctgatgagctacggttacgcgtaattcgcaaaagttctgaaaaagggtcacttcggtggcccttttttatcgccacggtttgagcaggctatgattaaggaaggattttccaggaggaacacatgaacatcattgccattatgggaccgcatggcgtcttttataaagatgagcccatcaaagaactggagagcgcgctggtggcgcaaggctttcagattatctggccacaaaacagcgttgatttgctgaaatttatcgagcataaccctcgaatttgcggcgtgatttttgactgggatgagtacagtctcgatttatgtagcgatatcaatcagcttaatgaatatctcccgctttatgccttcatcaacacccacagcacgatggatgtcagcgtgcaggatatgcggatggcgctctggttttttgaatatgcgctggggcaggcggaagatatcgccattcgtatgcgtcagtacaccgacgaatatcttgataacattacaccgccgttcacgaaagccttgtttacctacgtcaaagagcggaagtacaccttttgtacgccggggcatatgggcggcaccgcatatcaaaaaagcccggttggctgtctgttttatgatttttcggcgggaatactcttaaggctgatgtctctattagcgtcaccgagcttggtagcttgctcgaccacaccgggccacacctggaagcggaagagtacatcgcgcggacttttggcgcggaacagagttatatcgttaccaacggaacaagcacgagcaacaaaattgtgggtatgtacgccgcgccatccggcagtacgctgttgatcgaccgcaattgtcataaaagcctggcgcatctgttgatgatgaacgatgtagtgccagtctggctgaaaccgacgcgtaatgcgttggggattcttggtgggatcccgcgccgtgaatttactcgcgacagcatcgaagagaaagtcgctgctaccacgcaagcacaatggccggttcatgcggtgatcaccaactccacctatgatggcttgctctacaacaccgactggatcaaacagacgctggatgtcccgagcattcacttcgattctgcctgggtgccgtacacccattttcatccgatctaccagggtaaaagtggtatgagcggcgagcgtgttgcgggaaaagtgatcttcgaaacgcaaagcacccacaaaatgctggcggcgttaagccaggctagcctgatccacattaaaggcgagtatgacgaagaggcctttaacgaagcctttatgatgcataccaccaccagccccagttatcccattgttgctagcgttgagacggcggcggcgatgctgcgtggtaatccgggcaaacggctgattaaccgtagtgtagaacgagctctgcattttcgcaaagaggtccagcggctgcgggaagagtctgacggttggtttttcgatatctggcaaccgccgcaggtggatgaagccgaatgctggcccgttgcgcctggcgaacagtggcacggctttaacgatgcggatgccgatcatatgtttctcgatccggttaaagtcactattttgacaccggggatggacgagcagggcaatatgagcgaggaggggatcccggcggcgctggtagcaaaattcctcgacgaacgtgggatcgtagtagagaaaaccggcccttataacctgctgtttctctttagtattggcatcgataaaaccaaagcaatgggattattgcgtgggttgacggaattcaaacgctcttacgatctcaacctgcggatcaaaaatatgctacccgatctctatgcagaagatcccgatttctaccgcaatatgcgtattcaggatctggcacaagggatccataagctgattcgtaaacacgatcttcccggtttgatgttgcgggcattcgatactttgccggagatgatcatgacgccacatcaggcatggcaacgacaaattaaaggcgaagtagaaaccattgcgctggaacaactggtcggtagagtaagcgcaaatatgatcctgccttatccaccgggcgtaccgctgttgatgcctggagaaatgctgaccaaagagagccgcacagtactcgattttctactgatgctttgttccgtcgggcaacattaccccggttttgaaacggatattcacggcgcgaaacaggacgaagacggcgtttaccgcgtacgagtcctaaaaatggcgggataacttgccagagcggcttccgggcgagtaacgtgctgttaacaaataaaggagacgttatgctgggtttaaaacaggttcaccatattgcgattattgcgacggattatgcggtgagcaaagctttctactgcgatattcttggtttcacgctgcaaagcgaagtctatcgcgaagcgcgcgacagttggaaaggggatttggcgcttaatgggcaatatgtgattgagcttttcagttttccgttcccgccggaacgacccagccgaccggaagcttgcggtctgcgtcatctggcttttagcgttgatgacatcgatgcggcagtggcgcaccttgaaagccataacgtgaagtgtgaaaccatccgtgtcgatccatacacgcaaaaacgcttcaccttctttaacgatccggacgggctgccgttggaactgtatgagcagtaaggcttgtcatcgccgcatttgcccggtaacgtgccgggcattgctactgtaaaatcgcaccatcatgacactcacgctcaatagacaacttctcaccagtcgccagattctggtggcctttagcggcgggcttgactccaccgttctgctgcatcagttggtgcagtggcggacggaaaatccgggtgtcgctctgcgcgctattcatgtgcatcacggtttaagtgccaatgccgatgcctgggttacgcattgcgaaaacgtctgccaacagtggcaggtgccgctggtggtcgaacgcgtacaacttgcgcaagaaggactgggcattgaggcccaggcgcggcaggcacgttatcaggcatttgcccgcaccttgttgcccggtgaagtgctggtcaccgcgcaacatctcgacgatcaatgtgaaacctttctgctggcgctaaaacgcggcagtggccctgccgggcttagcgctatggcggaagtcagcgagtttgccggaacgcggcttattcgcccgttgctcgcccgcacgcggggggaactggtgcagtgggcgcgtcagtatgatttacgctggattgaagacgaaagtaatcaggacgacagttacgatcgtaactttctgcgcctgcgcgtagtgccgttattgcagcagcgttggccgcattttgccgaagcaacggcccgcagcgccgcactttgtgctgaacaagagagcctgctggatgaactgctggcagatgatttagcacactgtcaaagcccgcaggggacgctgcagattgtgccaatgctggcgatgagtgatgcccgccgcgcggcgattatccgccgctggctggcagggcagaatgcaccgatgccttcccgcgacgcgttggtgaggatctggcaggaagtggcgctggcgcgggaagatgccagtccctgtttacgtttgggcgcgtttgaaatccgacgctatcagagccaactgtggtggattaaatccgtcaccgggcaaagcgaaaacattgtgccgtggcagacgtggcttcaaccgctggaattaccggcggggctgggaagtgtacagcttaatgcgggaggcgatattcgccctccgcgtgcagacgaagcggtcagcgtgcgtttcaaagcgccaggattgctgcatattgtcgggcgtaacggcggacgtaagctaaagaaaatctggcaagagctgggcgtgccgccgtggctacgtgacaccacgccactgctgttttatggcgaaacgctgattgcggcggcaggggtatttgtgacgcaagaaggtgtggctgaaggtgagaatggcgtaagttttgtctggcagaaaacgcttagttaagtgaaagccggataagacgcatcaaacgtcgcatccggcgaaagtcaatcaggattcgcttaccaccaccgtaccgatttccgggtggctaaagctggtaattttatccagacgcagctcgcgggtttcgccagcggcctcgacgaccaggtactccacatttttgcgggagactaaatcactggcttttgcctgcaatttttcgccatctttcagctcaagtgtcagcattaaatgatgctggcaggcgagctcaagattatcgtaatcatcacaattgattggttgatacgtatcattcattgacataatcgctcaccagtaagtttgccgcagcgtatgctgctttttccctgacagcctcagaaagggcgtcgtcggcagccatttcattcagcactttcaaaacgcagcccagcgcgtccggaacgtatcctaagtctccgctggcgatttccgcgtaccgcttgcgtattaactcacaatatttttccacatgccctcctgtcagcactctgacttaaccgtggatgcaagtctaagcctacgaagataaactctgtttcgcaaggtgactataccacactcatttctgcaatatcagcgccgcaactgcacgtattccgttacaatggcctcctgattcgaaaggagttttcttatggcgcttaaagcgacaatttataaagcgacggttaatgtggccgatctcgaccgcaaccagtttctcgatgcctctctgacgctggcgcgccatcctagtgaaacccaggagcgtatgatgctgcgcttgctggcgtggctgaaatatgctgatgaacgtctgcaatttacccgtggtttgtgtgccgatgatgagccggaagcgtggctgcgtaacgatcacctgggcattgatttgtggattgagctggggctgccggatgagcggcggattaagaaagcctgcacccaggccgcagaagtggcgctgtttacctataatagtcgggcggcgcaaatctggtggcagcaaaatcagagcaaatgtgtgcagtttgccaatctttccgtctggtatctggacgatgaacaactggcgaaagtaagcgcctttgccgatcgtaccatgacgctgcaggcaacgattcaggatggcgtgatctggttaagcgatgataagaataatctggaagtgaacttaaccgcctggcaacaacctagttgaactaaaccgcctggcaacaaccttcatgattgtgatttcccgacatgttgctattcccgatggtgagcttgagatcaccgccattcgtgcgcagggcgcgggcgggcagcatgttaataagaccagtacggctattcatctgcgttttgacattcgggcgtccagcctgccagagtattacaaagagcgtctgctcgccgccagccatcatttgatcagcagtgatggcgtgattgtcattaaggcacaggaataccgcagtcaggaactgaaccgcgaagcagctctggcccggctggtggctatgattaaagaattaacaacagaaaaaaaagcccgacgacccacgcggcccacccgtgcaagcaaagagcgcaggctggcaagcaaagcacaaaaaagtagcgtgaaggcgatgcgcggcaaagtgcgcagcggtcgggaataaaaagaaggaatggatggtgaaaaaagcgatagtgacagcgatggctgtaatcagcctctttactctgatgggatgtaataatcgggccgaagtcgatacgctttctccggcgcaggctgccgaactgaaaccgatgccgcaaagttggcgcggcgtgctgccgtgtgccgattgcgaaggaatcgaaacctctctgttcctcgaaaaagacggaacatgggtgatgaatgagcgttatctcggtgctcgtgaagaaccttcctccttcgcttcctacggtacatgggcgcgaaccgctgacaagctggtattaaccgacagcaaaggtgaaaagagttattatcgggcgaaaggcgatgcgctggagatgctcgatcgtgaaggcaatccgattgaaagccagttcaactatacgctggaagcggcacaatccagtttacctatgacgccgatgaccctgcggggcatgtatttttatatggctgatgcggcgaccttcactgattgcgcgaccggaaaacgtttcatggtagcgaataacgcagagctggagcgtagctacctggctgcgcgcggtcacagtgaaaaaccggtgttactgagtgtagaaggtcactttacgcttgagggtaatccggataccggtgcgccgactaaagtattggcacccgatacggcagggaaattttaccccaaccaggattgcagtagtttggggcagtaacccgtcttgagacagaaacaaacgcaaaacaggccagaaggatatatttcaacattttgaatttgcacgttttttgtaggccggataaggcgtttacgccgcatccggcaatggtgctcaacgcctgatgcgacgctggcgcgtcttatcatgcctacaacccccctcataccttaaggcggataaggcatttactttatcaccgggtcaaaccaacaaagcgacccgccttgatataaatcccaggcttcaggtgcccaacatactgtaactgcgtttctggcttaaacgcagagacatcaccaatacgcatatgcatcagatcggcagggctaatccagccgctttgcgccagtgtaagtggatgcccggctttggcaaaggcatccgtgacaaattcgctacaaaaccagctctttttgtctccttcgcccacactgcttaactgcgctttcgccaggccgctgacgcactgttggcgaaaatcctcggagaacggattcagactgcacatctggcgagtcaccataaagggaataaattcgacaatgccgcgatagttataaccgctatctttgattttattggcaaacgcggtgatatctgtggcttgttgcggggtaagatccgggactcgtaagacgaaaagcttatcactatgcttcatcgcttttttaagggaaacgatctggacgccagcgcctgtcgcttctgcaacgttattatcacccagaaagattgcaacgtgactcacagaggaagtgctgaagacgcggattccaaaactggttaccccaaggctactggagaacagcaaatcgccgggtttgagatcaggtgccgttatttcttttatactttgttcggtgaaagagctttgatgctggaatttgacagcccatgtttttgcctcggcatctactgctgtggcacttgggtctggctggctgatatcaacggtacaagcgctaagtaaaagaaagctggggagaaacaggcggcagtacgcctttggtttatccattttatacaatccatgtaaaaaaagggccctgaaattcaggaccctttctggcatcagcctttaatctgtttcaccagatattcgacgatgtcaccagtcttaattaactgtttctcgccgttgcgacgatatttatattcgatatcgtcgttgtcgaggttacggtcgcccagcacaatagtgtgcggaataccgatcagttccatatcagcaaacatcacgcccggacgctctttgcggtcatccagcagcacttcgataccttgtgcacgcagttcgctgtacagtttctcagcaagctcttgtacgcggaaggatttgtgcatgttcatcggcagaatcgccacctggaacggcgcgatagcgtcaggccatacgatgcctcgttcgtcgtagttctgctcaatcgccgcagctaccacacgcgttaccccgataccgtagcaacccatcgtcaggatttggttacggccatcttcaccctgtacggaggctttcagtgcttcggagtacttggtacccagctggaagatgtgaccaacttcgataccacgtttgatcagcagcctaccctggccatccgggcttggatcgccagccaccacgttacggatatctgcaacttccggggtagcgacatcgcgatcccagttgatgccgaagtagtgtttaccatcgatgttagcaccagcagcgaaatcactcatcgccgcaacggtacggtcaatcaccaccggaatcggcatgtttaccggacccagactacccggaccggctttaaccacggcacgaatttcttcttcggtcgcgaaagtcagcgggcttgcaacctgcggcagtttttctgctttaacttcgttcagctcgtgatcaccgcgcaccagcagcgcaacctgcgggaagctgctgccttcaaccgctttaaccagcagagtcttaaccgttttctcaatcggcagattgaactgttcaaccagttccgcgatggttttcgcgttcggcgtatcaaccagcgtcatttcctgggtagcagcagcgcgcggttctttcggcgcgatagcttctgccagttcaatgttcgctgcatagtcagaggtgtcggagaagaccacatcgtcttcaccgctctgcgccagcacctggaattcgtgagaggcgctgccgccgatagaaccggtgtcggcttgtacggcgcggaaatccagccccatgcggctgaagattttgctgtaggccgcatacattgcatcgtaggtttcctgcagggattcctgagaagtatggaaagagtaagcatctttcatcaggaattcgcgggaacgcatgacgccgaaacgcggacgcacttcgtcgcggaacttggtctggatctgatagaagttcagcggcagctgtttgtaagagctaagctcgttacgaatcaggtcagtgataacttcttcatgagttgggccgagtacgaacggacgctcgccacggtcaacaaaacgcagcagttccggaccgtactgttcccaacgaccactctcttgccacaaatcggctggctgaaccaccggcatgctcacctcgatcgcaccggcgttgttcatctcttcacgcacgatgttttcgacttttttcagaacgcgcacgccggtcggcagccaggtatataacccggaggccagcttgcggatcatcccggcgcgcagcatcagctgatggctgatcacctcggcgtcggcaggtgtctccttgagagtggagagcaggtattggctagtacgcatgttgttacggttccagttggaaggtagaacaggctcaaggcgagcctgggacaaaaaaagtgatttagtttaccagtgcaaaagaaatgtcaaaagagaagggcgtgaatttaacgcggttccagcgcaaagacttcaaaacctgcgtcggtgacgcgccagcgaacgttaaaatcatgtagccagacggcataggttttgcccgtttcctcacctttacgataggccgggcgcgggtcctgcgccagtacttcgcggataaacagcgttaactgcggataacgcttctccagcgtcaaaagctgcttttcgacctctgcggtaaaactcaccgccatctctgcagctggcgcactttgcgcatagctggcactggcatcgggaaggctttcggcaaaggggagatacggtttgatatccactaccggcgtaccatcgaccagatccagactgccgagcttcagaatcacgctgtctttatggcaaacaacctctttcagctctaccaggctcatgccaattgggttagggcggaaagtagagcgtgttgcgaaaacccccattctggcgttaccgccgaggcgcggtggacgcacagtcggacgccagccgccttccatcgtttgatgaaagacgaaaaggatccataaatggctgaacgcttccaggccgcgaacggcgtcggcctggttgtagggagcaatgagatgcagttcgccgttggcgctttttaccagacctggctggcgcggaacggcgaacttttctttataggggctgcgaataacgcctatttgctcgaactggaaactgctcatttcgccgtaatgttaagcgcagaaccgatacatacagcctgacgatagcagcctggcgtaccgctggtgacttcgcagctatgcagtaatacagcattggctttcattttagaggcgttgatttgcatccgcttacgtgcggttggaatgctcggcggagagtcctgattagaggcctggcaagagtcgccactgacttcaccgagatcgcggaacggtttgccgactaattcttctgcattggtataaattcggaccggcgtggcgcgcggcgctttcggttttgcaggctccgctttcggctggggtgcagtgctttgaacgggttcgacaggggatctgcttaacatggaacagccgcttagcatgagtgctactaaacagatcggtaaagcacgcatagtatttcctcaatgtatgatcaaaacgtcaatattgaatcaggagcttgtaaaaatgacaagacgggcaagcgcccgtcctgaatgatattacaaattgtggaaacagcctaaaaattaccagcctttaacagctccgccgttaaacactttgtttgctgcttcgtaaacttcgtcagactgataagcctggacgaatttcttcacgttctcggcgtctttgttatcttcacgcgtcacgatcaggtttacgtacggggactctttatcttcaacaaagataccgtctttcgccggagtcaggccaatctggctggcataggtggtattgataactgccagagcgatttgcgcgtcgtccagagaacgcggcagttgcggtgcttccagttcaacaattttcagatttttggggttctcaacaacatcaagaacggtcggcagcaggccaacgccatctttcagtttgatcaagcccactttttgcagcagcagcagactacgaccaaggttagttgggtcgtttggcacggcaacctggctaccatcctgcagttcatccagacttttgattttcttggagtaaccagcaatcggataaacaaaagtgttgcctactgcgaccagtttgtagccacgatctttcagttgctgatcaaggtacggtttatgctggaaggcgttggcgtcgatatcgcctttgctcaatgcttcgtttggcagaacatagtcgttgaaggttaccagctcaacgtccaggccatatttgtctttcgcaactttctgcgcgacttctgcaacctgctgttcggcaccaacaatcacgccgactttaatgtggtttggatctttttcatcctgaccgcagcctaccagtgccagacttccgatcagggctcccactgccgcaaaggttttgaatttgaacgccataccttattccttcttcaattatttatgttgtgttgaacgttacttgcgagtgacagcccggacgatgcggtcgcctgcgaactgaattaaataaaccagaatgaccagcaataccagtaccgtattcatcaccgtcgcgttatagccgatgtagccatactgatagccaatctgacctaaaccaccggcaccgactgcaccacccatcgcggaataaccgaccagggtaatcagggtgatagttgccgcattcaccagacccggcagcgcttccggtaacagcaccttacggacgatctgcatcggcgtggcacccattgcgcgggaagcttcaattaacccggttgggatctccagcagagcgttctcgaccatacgggcaataaacggtgctgcaccaacggttaacggaacaatcgctgcctgcaaaccaatgcttgtaccgacaataacgcgggtaaacggaatcatccatacaagcaagataatgaacgggatggaacggaaaatgttcacaatcgcagaaacggtacgatacagcttcgcgttagcaataatttgccccggacgcgtgacataaagcagaacgccaaccggcagaccaatcacaaagccaaaaaaaccggatacgaaggtcattgccagcgtttcccatacgccacgaaccagcagccacatcatcggctcagacataacccagtacctctacttttacatggtgttcctgcagccaggcaatggcggcttgcgtatcttgttgtgtgccgtgcatttcagtcagcatgatgccgaacttaacgccaccggcgtaatccatctgcgcgctaataatgttgttgttgacgttgaaacgacgcgcggtttcagaaagcagtggggcatcgacgctttgaccggtaaactccagacgcagcatcggcacgcagtcagtaaatggctccgcttgcagacgttcctggtaatcttccgggatatccagatgcagggtgctctgaataaacttctgcgccagcggcgttttcggatggctgaacacttcacttaccgtgtcctgctcgatcagttctccattgctgatgaccgccacgcaatcacaaatgcgcttcacaacgtccatttcgtgggtgatcaacagaatcgtcaaccccagacggcggttgatgtctttcagcagttcgagaatagaacgtgtcgttgccgggtccagcgcgctggtggcttcatcacacagcaatactttgggattgctggctaacgcacgggcaattgccacacgttgtttctgcccaccggaaagattgctcgggtagctatcatgcttatcgccaagaccaaccaaactcagcaattccgtcacgcgacgtttgacctcgtctttcggtgtgttgtccagctccagcggcagagccacgttgccaaaaacagtacggctagagagcaggttaaaatgctggaaaatcataccaatctggcggcgagctttggtcaactcggattcactcagcgtggtcagttcctggccatcgaccagcacgctaccctcggttgggcgctccagcaggtttacacaacgtataagcgtactcttacccgcgccactggcaccgataacgccataaatttgtccagctggcacatgcaggctgacgttgttcaacgcctggatggtgcgggtgccctggtggaacactttggtgatattgctaagttttatcattgattatttattatcgtcattaagttagtcgtggcatctcgaatgcctgaaacgggcaacgccgtcaatgaaatggatgttaaggcatccagacgtctaaatcaatcaggtttatgcgaagagcactttcttgcaggtcgaaacatgcgatactagcgtcacatgccttattaaggagctataaaaggtggcgaagagcgtacccgcaatttttcttgaccgtgatggcaccattaatgtcgatcacggctatgtccatgagatcgacaactttgaatttatcgacggtgttattgacgccatgcgcgagctaaaaaaaatgggctttgcgctggtggtagtaaccaaccagtctggcattgctcgcggtaaatttaccgaagcacagtttgaaacgctgaccgagtggatggactggagcctggcggaccgagatgtcgatctggatggtatctattattgcccgcatcatccgcagggtagtgttgaagagtttcgccaggtctgcgattgccgcaaaccacatccggggatgcttttgagtgcacgcgattatttgcatattgatatggccgcttcttatatggtgggcgataaattagaagatatgcaggcagcggttgcggcgaacgtgggaacaaaagtgctggtgcgtacgggtaaacctattacgcctgaagcagaaaacgcggcggattgggtgttaaatagcctggcagacctgccgcaagcgataaaaaagcagcaaaaaccggcacaatgattaaaagatgagcggttgaaataaaaatgcatttttccgcttgtcttcctgagccgactccctataatgcgcctccatcgacacggcggatgtgaatcacttcacacaaacagccggttcggttgaagagaaaaatcctgaaattcagggttgactctgaaagaggaaagcgtaatatacgccacctcgcgacagtgagctgaaagccgcgtcgcaactgctctttaacaatttatcagacaatctgtgtgggcactcgaagatacggattcttaacgtcgcaagacgaaaaatgaataccaagtctcaagagtgaacacgtaattcattacaaagtttaattctttgagcatcaaacttttaaattgaagagtttgatcatggctcagattgaacgctggcggcaggcctaacacatgcaagtcgaacggtaacaggaagaagcttgcttctttgctgacgagtggcggacgggtgagtaatgtctgggaaactgcctgatggagggggataactactggaaacggtagctaataccgcataacgtcgcaagaccaaagagggggaccttcgggcctcttgccatcggatgtgcccagatgggattagctagtaggtggggtaacggctcacctaggcgacgatccctagctggtctgagaggatgaccagccacactggaactgagacacggtccagactcctacgggaggcagcagtggggaatattgcacaatgggcgcaagcctgatgcagccatgccgcgtgtatgaagaaggccttcgggttgtaaagtactttcagcggggaggaagggagtaaagttaatacctttgctcattgacgttacccgcagaagaagcaccggctaactccgtgccagcagccgcggtaatacggagggtgcaagcgttaatcggaattactgggcgtaaagcgcacgcaggcggtttgttaagtcagatgtgaaatccccgggctcaacctgggaactgcatctgatactggcaagcttgagtctcgtagaggggggtagaattccaggtgtagcggtgaaatgcgtagagatctggaggaataccggtggcgaaggcggccccctggacgaagactgacgctcaggtgcgaaagcgtggggagcaaacaggattagataccctggtagtccacgccgtaaacgatgtcgacttggaggttgtgcccttgaggcgtggcttccggagctaacgcgttaagtcgaccgcctggggagtacggccgcaaggttaaaactcaaatgaattgacgggggcccgcacaagcggtggagcatgtggtttaattcgatgcaacgcgaagaaccttacctggtcttgacatccacagaactttccagagatggattggtgccttcgggaactgtgagacaggtgctgcatggctgtcgtcagctcgtgttgtgaaatgttgggttaagtcccgcaacgagcgcaacccttatcttttgttgccagcggtccggccgggaactcaaaggagactgccagtgataaactggaggaaggtggggatgacgtcaagtcatcatggcccttacgaccagggctacacacgtgctacaatggcgcatacaaagagaagcgacctcgcgagagcaagcggacctcataaagtgcgtcgtagtccggattggagtctgcaactcgactccatgaagtcggaatcgctagtaatcgtggatcagaatgccacggtgaatacgttcccgggccttgtacacaccgcccgtcacaccatgggagtgggttgcaaaagaagtaggtagcttaaccttcgggagggcgcttaccactttgtgattcatgactggggtgaagtcgtaacaaggtaaccgtaggggaacctgcggttggatcacctccttaccttaaagaagcgtactttgcagtgctcacacagattgtctgatgaaaatgagcagtaaaacctctacaggcttgtagctcaggtggttagagcgcacccctgataagggtgaggtcggtggttcaagtccactcaggcctaccaaatttgcacggcaaatttgaagaggttttaactacatgttatggggctatagctcagctgggagagcgcctgctttgcacgcaggaggtctgcggttcgatcccgcatagctccaccatctctgtagtggttaaataaaaaatacttcagagtgtacctgcaaaggttcactgcgaagttttgctctttaaaaatctggatcaagctgaaaattgaaacactgaacaatgaaagttgttcgtgagtctctcaaattttcgcaacacgatgatggatcgcaagaaacatcttcgggttgtgaggttaagcgactaagcgtacacggtggatgccctggcagtcagaggcgatgaaggacgtgctaatctgcgataagcgtcggtaaggtgatatgaaccgttataaccggcgatttccgaatggggaaacccagtgtgtttcgacacactatcattaactgaatccataggttaatgaggcgaaccgggggaactgaaacatctaagtaccccgaggaaaagaaatcaaccgagattcccccagtagcggcgagcgaacggggaggagcccagagcctgaatcagtgtgtgtgttagtggaagcgtctggaaaggcgcgcgatacagggtgacagccccgtacacaaaaatgcacatgctgtgagctcgatgagtagggcgggacacgtggtatcctgtctgaatatggggggggaccatcctccaaggctaaatactcctgactgaccgatagtgaaccagtaccgtgagggaaaggcgaaaagaaccccggcgaggggagtgaaaaagaacctgaaaccgtgtacgtacaagcagtgggagcatgcttaggcgtgtgactgcgtaccttttgtataatgggtcagcgacttatattctgtagcaaggttaaccgaataggggagccgaagggaaaccgagtcttaactgggcgttaagttgcagggtatagacccgaaacccggtgatctagccatgggcaggttgaaggttgggtaacactaactggaggaccgaaccgactaatgttgaaaaattagcggatgacttgtggctgggggtgaaaggccaatcaaaccgggagatagctggttctccccgaaagctatttaggtagcgcctcgtgaactcatctccgggggtagagcactgtttcggcaagggggtcatcccgacttaccaacccgatgcaaactgcgaataccggagaatgttatcacgggagacacacggcgggtgctaacgtccgtcgtgaagagggaaacaacccagaccgccagctaaggtcccaaagtcatggttaagtgggaaacgatgtgggaaggcccagacagccaggatgttggcttagaagcagccatcatttaaagaaagcgtaatagctcactggtcgagtcggcctgcgcggaagatgtaacggggctaaaccatgcaccgaagctgcggcagcgacgcttatgcgttgttgggtaggggagcgttctgtaagcctgtgaaggtgtactgtgaggtatgctggaggtatcagaagtgcgaatgctgacataagtaacgataaagcgggtgaaaagcccgctcgccggaagaccaagggttcctgtccaacgttaatcggggcagggtgagtcgacccctaaggcgaggccgaaaggcgtagtcgatgggaaacaggttaatattcctgtacttggtgttactgcgaaggggggacggagaaggctatgttggccgggcgacggttgtcccggtttaagcgtgtaggctggttttccaggcaaatccggaaaatcaaggctgaggcgtgatgacgaggcactacggtgctgaagcaacaaatgccctgcttccaggaaaagcctctaagcatcaggtaacatcaaatcgtaccccaaaccgacacaggtggtcaggtagagaataccaaggcgcttgagagaactcgggtgaaggaactaggcaaaatggtgccgtaacttcgggagaaggcacgctgatatgtaggtgaagcgacttgctcgtggagctgaaatcagtcgaagataccagctggctgcaactgtttattaaaaacacagcactgtgcaaacacgaaagtggacgtatacggtgtgacgcctgcccggtgccggaaggttaattgatggggttagcgcaagcgaagctcttgatcgaagccccggtaaacggcggccgtaactataacggtcctaaggtagcgaaattccttgtcgggtaagttccgacctgcacgaatggcgtaatgatggccaggctgtctccacccgagactcagtgaaattgaactcgctgtgaagatgcagtgtacccgcggcaagacggaaagaccccgtgaacctttactatagcttgacactgaacattgagccttgatgtgtaggataggtgggaggctttgaagtgtggacgccagtctgcatggagccgaccttgaaataccaccctttaatgtttgatgttctaacgttgacccgtaatccgggttgcggacagtgtctggtgggtagtttgactggggcggtctcctcctaaagagtaacggaggagcacgaaggttggctaatcctggtcggacatcaggaggttagtgcaatggcataagccagcttgactgcgagcgtgacggcgcgagcaggtgcgaaagcaggtcatagtgatccggtggttctgaatggaagggccatcgctcaacggataaaaggtactccggggataacaggctgataccgcccaagagttcatatcgacggcggtgtttggcacctcgatgtcggctcatcacatcctggggctgaagtaggtcccaagggtatggctgttcgccatttaaagtggtacgcgagctgggtttagaacgtcgtgagacagttcggtccctatctgccgtgggcgctggagaactgaggggggctgctcctagtacgagaggaccggagtggacgcatcactggtgttcgggttgtcatgccaatggcactgcccggtagctaaatgcggaagagataagtgctgaaagcatctaagcacgaaacttgccccgagatgagttctccctgactccttgagagtcctgaaggaacgttgaagacgacgacgttgataggccgggtgtgtaagcgcagcgatgcgttgagctaaccggtactaatgaaccgtgaggcttaaccttacaacgccgaagctgttttggcggattgagagaagattttcagcctgatacagattaaatcagaacgcagaagcggtctgataaaacagaatttgcctggcggccgtagcgcggtggtcccacctgaccccatgccgaactcagaagtgaaacgccgtagcgccgatggtagtgtggggtctccccatgcgagagtagggaactgccaggcatcaaattaagcagtaagccggtcataaaaccggtggttgtaaaagaattcggtggagcggtagttcagtcggttagaatacctgcctgtcacgcagggggtcgcgggttcgagtcccgtccgttccgccacttattaagaagcctcgagttaacgctcgaggttttttttcgtctgtatatctattattgccagaatcgcaaaaatcctctgcattttacgctctttttcctcaacagtctgaagcccataatcacctcagttaacgaaaatagcattaaaagaggcatattatggctatccctgcatttggtttaggtactttccgtctgaaagacgacgttgttattagttctgtgataacggcgcttgaacttggttatcgcgcaattgataccgcacaaatctatgataacgaagccgcagtaggtcaggcgattgcagaaagtggcgtgccacgtcatgaactctacatcaccactaaaatctggattgaaaatctcagcaaagacaaattgatcccaagtctgaaagagagcctgcaaaaattgcgtaccgattatgttgatctgacgctaatccactggccgagtccagacgatgaagtctctgttgaagagtttatgcaggcgctgctggaagccaaaaaacaagggctgacgcgtgagatcggtatttccaacttcacgatcccgttgatggaaaaagcgattgctgctgttggtgctgaaaacatcgctactaaccagattgaactctctccttatctgcaaaaccgtaaagtggttgcctgggctaaacagcacggcatccatattacttcctatatgacgctggcgtatggtaaggccctgaaagatgaggttattgctcgtatcgcagctaaacacaatgcgactccggcacaagtgattctggcgtgggctatgggggaaggttacagtgtaattccttcttctactaaacgtaaaaacctggaaagtaatcttaaggcacaaaatttacagcttgatgccgaagataaaaaagcgatcgccgcactggattgcaacgaccgcctggttagcccggaaggtctggctcctgaatgggattaagcctctctgacagctcctccgggagctgtttttacatgctcgctaaggaaatcgataaaagcccggatgcgcgtacttaccgcacggtcgctgtaatagacggcactgaatggcatttccactggcaacactttatctgccattaactccaccaattctccgcgagcgatttctttgtcgatcatgtagtcggacaaacacgcaatcccgttgccactcaggcaaagctgtttcagtgtttccccactattggaactcaaaccgtacttcacctcatgtaattgtccatcgctacgggctatcggccaggtattgagggaagcgggttcagtgaatcccaggcaaatatgttgctttaaatcgtcgatcgtttctggcttcccgtagcgggaaatataatcgggggaggcgataatttttcgataactgttaaataacggcctggcacgtaagctggaatccgttaacgtaccagcgcgtatcgcgacatccacttttctttcgatcaaattaataatcgtttcggaggagactaggctcaaagtgacttccggatagcgttcacggaaaggcttaattaacggcatcagaaagtgcagcaccactggagttgcggcatcgatccgtaacagtccacgcggtgtattacgcgtctccataatttcactttctgccgctgccatctcctgcaaaatactctgtacgcgacgaaaataacgctcgccttcttccgtcaggctaagttgtcgcgtggtccgattaagcaggctaacgccaagtttcatctccagctttttcaccgcccggcttaccgcactgtttgcttgccctaattgttccgctgcccggctaaagctgccgctttcgacgacgctaacaaaaatggcgagttcttcgctcgtggctttcatttttgctcctgttgcaaaatagaagagatattttgaatttatttgtcattaaaccatcaggatgcgtgatatgtcatgcgatttaatgttctccataatgagcaaaattctgaccggtgtaagcacttgcttacataacaatatacaattgctcgttgaaagagtgagctaaaatccctataacagtagaaccctcccgagtgcggaagggttgacgtaatagaggtttcaaagtcaaaagtgcgaaaaaacacctatgccatgcgctatgttgccggacaacctgcggaaaggatcttaccgccggggtcttttgcgagcatcggccaggcattaccacctggggaaccgttaagtaccgaagagcgtattcggatcctggtgtggaacatatacaaacagcaacgcgctgaatggttgagcgtattaaagaactacggcaaagatgcacatctggtgttattgcaggaagcgcagacaacgccagagttagtacagtttgcgaccgctaactatcttgccgccgatcaggtacccgctttcgtgctgccacaacatccttctggcgtaatgacccttagcgcggcacatccagtgtattgctgcccgttacgtgaacgagaacccattttgcgtctggcgaagagcgcactggtgacggtctatccattacctgacacccgcctgttgatggtggttaatatacacgccgtcaacttcagtctgggcgtggatgtctatagtaagcagttacttcctattggcgatcagatagctcaccacagcggcccggtcattatggcgggagatttcaatgcctggagccgtagaaggatgaacgcgttatatcgctttgcgcgggaaatgagcctgcgccaggtgcgttttaccgatgatcagcgccgtcgggcgtttggtcgcccgctcgattttgttttctaccgtggtctgaacgtcagtgaagcttctgtactggttacgcgcgcttccgatcacaatccgctactcgttgaattcagtcccggcaagcctgataaataaggtatgagtggtctgccacagggcagaccaacgtttggcgctgcgcaaaacgtgagcgcggtggtggcgtatgacttatctgcccacatgctggatgtcgtggcacaagctgccgaagcccggcaactgaaaaatatcaccacccgccagggatatgccgaaagtctgccatttgccgataacgcatttgatattgttatcagccgttattctgcccatcactggcatgatgttggtgcagcactgcgagaagtgaataggatattgaaacctggcggtaggctgattgtgatggacgtaatgtctccgggtcacccagtgcgcgacatctggttacagacggtagaagcattacgcgatacctctcacgtacgaaactacgccagcggtgagtggttgacgttaatcaatgaagccaatctgatagttgataatttaattacagataagttaccgctggaattttctagttgggtcgcgagaatgcgtacgccagaagcgttagtagacgctattcgcatttaccaacagagcgcaagcacagaggtgagaacgtattttgccttgcagaatgatggctttttcaccagtgatatcatcatggtagatgcacataaagcggcataaataaaaaaggcaccgggggaatcggtgcctttttattatctggtttgtcaggaatctggcatgttgttgtttttcacaaacaacgtcagcttatcgcctggttgcagattcgcagtgtcgctgttccagcgcatcacatctttgatgttcacgccgtggcgtttagcaatgctactaaggctatcgcctttgcgcacacgatacgtaatgctatcgctgttgtttgccagtcgctgtgcgctactgcctgcaccaatcgtcaaactttggcctggcttcagcttagatccgcgcagtttgttccactgctgcaaatctttggtgcttacgccgagacgactagcgatactactaagcgtgtcgccagagcgtacggtgtaaacacggctgttaagcggcgtattgtcggcaaccagcgtgctctgtacagcagcaatttcgccactagccagagattcacgcagttgatctgcatgcttctttggcaccatcacgtactgcgggccacttgcgcccagcgtggagccttttacgccagcgttgaatgtcttcagcttgctgacggaaatccccgccatatctgctaccttcgccatttcaaccgggctgctcaggtgcacacgcgccagagcacggctttcatcggtcgttggcagacgtacgccataacgcttgctgtttttgagaatatcactcaatgccagcattttaggcacgtactgcttcgtttcctgcggcaacggtaagctccagaagtccgtggatttcccacgcgctttgttcgttttaattgccttcatgacccgaccttcgccgctgttataagccgctacggtcagaagccagtcgccgtcaaacattttgttcagacgctgcatcatattcagcgcggcagttgcactagcaacaacatcgcgacgcgcgtcataattgcgggtctgtttcaaaccataattgcgccccgtgctcggaatgatctgccagatgcctgcggcattggcgccagacgttgcgtgaggatcaaaagcgctctccactatgggtagtagtaccagttccataggcatgttacgttttttaacttgccctgctatccagtacatatacggctctgcccgtaaagttacatcgtggagatagctcttattgcgtaaatatttctgtttctgttcgcgaatccggtcattttccggaattcccatctttagctcgtcgccaatgaaagcccacaagtcaccatctggcgcgatagacgtcccatcgtccatccatcgtgcctgacttgtaaactttgctgcttccccttgaccagctgcagaaaggctctgtgcgtgctgttgaacgttgccggtactctggcaacccacgagcaggacagaggcgagtaatatcgcttttgccttcatgtgtgtgtcaatagttgcttaaaagacgaccgatcataacggcgaacggagccgatgacaagaaagttttatcagaacctatctttcttactccttaaccatgcaaaacgctcttcaggttgttgcaataatgtttcttcattaattacattaattaaatcaatatcttccgttcttaaaaaaacattaatttgccgctcatttttcagaattacgggtagtgttatttgattttttgcccgtaactccttaactttacgataataatcatttatggacaaatcgtgcggaagaatactcaaagcaaacttcatattacttaaggtatattcatgagcacaacataccaatgtatcgtcaggtaacgcacttaactttttaagactttgatacatttgacttgctgtcccttcaaacaaccgaccacacccaccagaaaacagtgtgtcgccgcaaaatagataaggtttactgaagtaacagatatgtcctaaagtgtgacccggcgtagcaattacactaaattcatgccccaaaacgaaggcagtttcgccatctttgactacctgtgttgttcccttatcttgtgtctcttgtggaccatacaccacaatttgtggaaacttttccaccagttcttttacgccgccaacgtgatcgtggtgatggtgggtgagaaatatggcctccggttgccagttattggcggcaatggcgtttaatactggctctgcgtctccgggatcgacaatcaggcagcgacctgcttcatcattcaaaacccagatgtaattgtcatcaaaggcgggaatactgttaagattcatagattacctctcagtgtgaaacggaaggttgtgatgaaaccggcaagagtccctcaaactgtcgtggctcctgattgctggggcgatttgccctggggaaagctttatcgcaaggcgctggagcgccagctcaacccgtggttcactaaaatgtatggttttcatctgcttaagattggcaatttaagcgcagaaatcaattgcgaagcgtgcgcggtttctcatcaagtgaatgtttctgcgcaaggaatgcccgtccaggtacaggcggacccacttcatcttccttttgccgataaatccgttgatgtttgtctactggcacatacattgccgtggtgcaccgatccgcatcgtttattgcgtgaagccgatcgggtattgattgatgatggctggctggtcattagtggcttcaatcccatcagttttatgggattacgcaaacttgtgccggtattgcgcaaaaccagcccctataacagccggatgtttactctgatgcggcagctggactggctctctttgttgaattttgaagtgctacacgccagccgtttccacgttctcccgtggaacaaacacggaggaaaactattgaatgcgcatattcctgcgcttggttgcttacaacttattgttgcccggaaacggactattcctttaacgctaaatccgatgaaacagagtaaaaacaagccacgaattcgccaggcggttggagccacccggcaatgtcgtaaaccacaggcttaaacttcaacttggtagcctgtatcttccagtgtgggattcatcgccgcggcacgagccagttcatcacagcgttcgttttccgggtgtccggcatggcctttaacccattcccatttgatttgatgctgccccaatgcagcatcaagacgttgccagagatcgacattttttactggttttttgtctgcggttttccagccacgttttttccagttatggatccactgggtgataccctggcggacatactggctgtcggtactcaaaatgacttcgcaatgttcttttaacgcctccagcgcgacaatagcggccatcaactccatacggttgttggtggtgcgggtgtagccagcgctaaaggttttctcgcgtccgcgatagcgtaaaatagcgccgtaacccccaggtcctggattgcccagacagctaccatcggtgaaaatttctacctgtttaagcatctctggtagacttcctgtaattgaatcgaactgtaaaacgacaagtctgacataaatgaccgctatgagcactgcaattacacgccagatcgttctcgataccgaaaccaccggtatgaaccagattggtgcgcactatgaaggccacaagatcattgagattggtgccgttgaagtggtgaaccgtcgcctgacgggcaataacttccatgtttatctcaaacccgatcggctggtggatccggaagcctttggcgtacatggtattgccgatgaatttttgctcgataagcccacgtttgccgaagtagccgatgagttcatggactatattcgcggcgcggagttggtgatccataacgcagcgttcgatatcggctttatggactacgagtttagcttgcttaagcgcgatattccgaagaccaatactttctgtaaggtcaccgatagccttgcggtggcgaggaaaatgtttcccggtaagcgcaacagcctcgatgcgttatgtgctcgctacgaaatagataacagtaaacgaacgctgcacggggcattactcgatgcccagatccttgcggaagtttatctggcgatgaccggtggtcaaacgagcatggcttttgcgatggaaggagagacacaacagcaacaaggtgaagcaacaattcagcgcattgtacgtcaggcaagtaagttacgcgttgtttttgcgacagatgaagagattgcagctcatgaagcccgtctcgatctggtgcagaagaaaggcggaagttgcctctggcgagcataaatacctgtgaaaggcgctaaaaatagcgacttgggcgatttttgcagcaaacgattcaaaagatgagaaaaaccgttgacgaaggtcgaggcaatccgtaatattcgcctcgttcccaacggaacacaacgcggagcggtagttcagtcggttagaatacctgcctgtcacgcagggggtcgcgggttcgagtcccgtccgttccgccactattcactcatgaaaatgagttcagagagccgcaagatttttaattttgcggtttttttgtatttgaattccaccatttctctgttcaatgattttactctggcgtaggtgcgtgattctcgcttgttgtctcattcattaaaattcaataatgatatcgaaccattcagcttaaatatatttctagagaataaatttatattgattaaatgaatgtatatttcaaattgattttgtttgttattatttaagtgaggtatataattagagtccgttatcaatgctaaatattctaatcattatgacaggcgagggagtgtccaattatgaatagtaaaaagctttgttgcatatgtgtgttattcagcctgcttgcaggatgtgcctctgaatcttctattgatgaaaagaagaaaaaagctcaagtcacacaaagtaatattaataaaaacactccccagcaactgacagacaaagatttattcggtaatgaaaccactctggccgtatccgaagaggatattcaagctgcgcttgatggagatgagttccgcgttccccttaattctcctgtaatacttgttcaatccggcaaccgcgcaccggaaaccattatgcaggaggagatgcgaaaatattatactgtttccacattctctggtatcccggacaggcaaaagcctctgacttgtaacaaaaacaaagataaaaatgagaacgaggatgttgccagtgctgagaatatgaactggatgcaggcactgcgttttgtggctgcaaaaggacatcagaaagcgattattgtttaccaggatatgttgcagacaggaaaatatgactctgcgctgaaaagtacagtatggtccgactataaaaatgacaaactcactgacgctatctccctgcgctacctggtacgtttcacgctggtggatgtggcaacaggtgagtgggctacctggagcccggtgaattatgaatataaagtgcttccaccattgcccgacaagaatgaagccagtacgactgatatgacagagcagcaaatcatgcaacttaagcaaaagacctataaagcgatggtaaaagatttggttaaccgctatcaataataaattatatctgccgccaggaatttctggcggcaataatacaaaattctttgcataagaaatttttcttgacaaagacagtgcaagaaaggacatggaatccggagttaaaaactgtttgttttagaatatttaattatttaactgctgaatcttccttgcgagaaatatatccattattacatttcatgccatttttaatatagattgctcctgggaaaattcccgtattattaccgcaggggtgataattagtattgacatatcctgtgacaaaaggagctattaaaggtgctattacgatagctattagtaaaaatataagagttagctgtattgttatgtctgtggcgaaattgactaccttcgtttttttgattaagaatgattttattatcgtaagtaaaattacatgaatatttaaaaaggaaaacgacatgaaaccgaagcacagaatcaacattctccaatcataaaatatttccgtggagcattttattattgaatatagaggtttaactccggtaaaaaacaaagaagcattgaatgcagggaaaaataatatggccataaaaaacatcgaaagaaactcttttaatttaacatgtaaacgcatggttaatcctcatatcacgggtggagtgttaagaacatacataaatggagtcatgttttcccttttccatttatcaagttcctgttgccgttttagtccatctctaattgcatattttaatttttcacttaaatggcattgagcatcgatttcatttaaaacaactgtacacactatccctgtcagtaaaattgctcctccgacaagaattactggaaagccaaagctaacacaggcaaaagaagccagacttccaatagcggttgcaacaccaccggctataactgctttggccacatccatactaaaatcgccaagaaaattaaccagatctcgctcactactcataataaattctatggttctgctgatttaaccgcagagaagttcgccacagcaatccgaaaccactggcacgtggagaataagctgcacaggcgtctggacgtggtaatgaatgaagacgactacaaaataagaagaggaaacgcagcagaattatttagtgggatacggcacattgctattaatattttgacgaatgagaaggtattcaaggcagggttaagacgtaagatgcgaaaagcagccatggacagaaactacctggcgagtgtccttgcggggagcgggcttagctaataataccccgactctccccgtccttaaacacaacccccactcaccacaacctaaactcatccgcatcctgccatgccggaaacttttctctatattcccgcaatgctgccatgctcagctccgcatcaatgcgcgttgcctgatgcgcgtcggcagtagcgataatctctccttgcggattaatcacccggctgtcaccgcgataatggcagccgttgccatcgctgccgacgcgattgcatcccgccacatacgcctgattctcaatcgcgcgggccgtcagcaatgcctgccagtgcagagagcgcggagcaggccagttggcgacgtacagggcgaggtcataatcgttgagattgcggctccacacaggaaaacgtaagtcgtagcacaccagcggcaaaatacgccagccgcgccattccacaatcactcgcgcattgcccgctttataatgtagatgctcatctgccatgcggaacagatgacgcttatcataaaaatgtaccgtgccgcccggctcaaccagcaaaaagcggttaacgctaccagactccgtttgtaatgcaacactgcctgcaatcagcgcattgcactgctgcgccttagctgtcatccagttcactacgtcatcttgtgctaggctgctagctgccgcttccatggcaaagccgctggtaaacatctccggtagaacgatcacatcgcgcccggtaataccttccagttgacgatcaaaatgacgcaggttggcaggaccatccatccacaccagtggttgctgcaaaagcgtaatcttcaaaccaggcacggtgtacaactcctttatgcgaagggttttataactttaacaccttatcaggcagttgccttagcgcagaataaattgataacaaatgctgatattggaaatatctgatttgcaaattatcgtgttatcgccaggctttaggaggttaataacatgggcaggataagcagcggaggaatgatgtttaaggcaataacgacagtcgccgctctggtcatcgccaccagtgcaatggcgcaggatgatttaaccattagcagccttgcaaagggcgaaaccaccaaagctgcatttaatcagatggtacaagggcataagctgcctgcctgggtgatgaaaggcggtacttatactcccgcacaaaccgtaacgttgggagatgagacgtatcaggtgatgagcgcgtgcaaaccgcatgactgtggcagccaacgtatcgctgtgatgtggtccgagaaatctaatcagatgacggggctgttcagcactattgatgagaaaacgagccaagagaaactcacctggctgaatgtgaacgatgcgcttagcattgatggtaaaacggtgttgttcgcggcgttgaccggcagcctggaaaaccatccggatggctttaattttaaataattagcggataaagaaacggagcctttcggctccgttattcatttacgcggcttcaactttccgcactttctccggcaactttaccggcttcgtcgccagctcttccggatcaaagtcatcaacgttaatactgcgcagacggctttcttcagctttcaccagaatagcggcttcatctttatcaatcagccccttcaccagcgcgttgtgcgccagttcatccagacgggtaaacggcaggtttttacccagctctttacagatccgctgatgaattgggtcggcggcaatcacatccaccagcgcctcttccagcaagccaaccggattatgctcgctcggcgtcaggtactgaccgcgaccaatgcgggaacgggtggcgttcggcacttgtaaaatcttcgccactttatgatccagcttgtcagaaggtgccagataatgacgtccggtcgggaagatcaccacattcagcagcccggcaaccacgcggttcgggaagttttgcagtaaatcatccatcgcctgttcagcctgatacagcgcatcttgtacgccccagtgcaccagcggcaggtcggcttcattacggccttcgtcgtcataacgcttcagcacggcagaggcgaggtagagctggcttaaaatatcccccagacgggcgctgatgcgctcgcgacgtttcaggctgccgcccagcactgccatgctgacatcagaaagcagggcgaggttggcgctcaggcggttcaggtgctgatagtagcgtttagtggcatcgccggttggcgtgctgctggttaaaccgcgcgtcaggcccagccagaagctgcgaactttgttgctaccgacgtgaccgatatgtttgaacaacagtttatcgaacgcgttgacgtcattgttcttcgccgcttccatctcttccagcacgtacggatggcaacgaatcgctccttgtccgaagatcatcatgctgcgggtcagaatgttagccccttcaacggtgatggcaatcggtgcgccctggtaagcacgcgccaggaagttgctttgcccgagcataatgcctttaccgccggtaatatccatcgcatcaataatgttctgctgcccgcggtgggtacagtgatacttaacgatagcgctcagcacggcaggtttttcgccgagcataatgccgtaggtaatcaggcttgccgcagcatccatcacgtaggcattaccggcaatacgcgccagcggctcttcaatcccttccatcttaccaatagagattttgaactgacggcgaatgtgagcatacgcgccggttgccagcgctacgcttttcacgccgccggtactgttggaaggcagggtgatgccgcggcctacgctgaggcactccaccagcatccgccagccttgcccggccattttcggcccgccgatgatgtaatcgatcggcacgaagacatctttaccgcgcgtcggtccgttctggaacggtacgttcagcgggaagtggcgacgaccaatttccacgcccggcgtggtggttgggatcagcgcacaggtaatgcctaaatcttctgcaccgccgagtaatttttccgggtcggagagtttaaacgccagcccaagcacggtcgcaatcggtgccagcgtaatgtagcgtttgttccaggtcagacgcatccccagcacctgctggccctgccattcgcccatgcagacaatcccggtgtccggaatcgcgcccgcatcggaacccgcttccgggctggtcagtgcaaagcaggggatctcctgaccacgcgccagacgcggcagatagtgatctttctgctcgtcagtgccgtaatgttgcaacagttcgcccgggcctaaactgtttggcacgccgacggtaatcgccaggatcccgctcacgccggagagtttttgcagcacgcgagactgggcataagcgctgaactccagcccgccgtactcttttttgatgatcatcgcgaagaaacgatgctctttaaggtacgcccacaactccggcggcagatccgccagctcatgggtgatctggaaatcattcgccatccggcaggcttcttctaccgggccgtcgagaaacgcttgctcttcggcggtcaggcgcggctgcggatagttatgcagctttttccagtccggcttgccctggaacaagtcgccctcccaccaggtggtgcccgcatcaatcgcttctttctcagtgcggctcatcggcggcatcaccttacggaaaccgcgaaataccggcgcggaaatcatgctcttacgcataggcgcaaagttaaatggcacgaggataatggccagaggcaccagtacccacgcgctccacagaccagcaacgccgagggcggctgtccaggcgagcaaaatcagactgctgataaataagctcacgcggtgatagaacaacgcgccgagcaggacaaccgtagcgagaatactcaaaatcatcataacgaaaagccccttacttgtaggaggtctgaccacttgtgatgatatggttgtagtggatgtaaaaacatttagcaatatgtttacaatataattacaacaaagctcacattgttgctgtttttatccgcacttcaggtcaaaaagtcctggtcatagcacctgcccgtacttctcgcttttggcggtatccggtacactgcattttgtctattacatttatgctgaaggatatcctcatgtaccaggatcttattcgtaacgaactgaacgaagcggcggaaacgctggctaactttttaaaagatgacgccaatattcacgccattcagcgcgcggcggtcctgttagcagacagctttaaagccggtggcaaagtgctttcctgcggcaacggcggttcccattgcgacgctatgcactttgccgaagagttgaccggtcgctaccgtgaaaaccgtccgggctacccggcgattgctatttctgacgttagtcatatttcctgcgtcggtaatgatttcggtttcaatgatattttctcccgctacgttgaagcggtaggtcgcgaaggcgatgtactgctggggatctccacctccggtaactctgcaaacgtgatcaaagcgatcgcagcggcgcgtgagaagggaatgaaagtgatcaccctgaccggtaaagacggcggcaaaatggctggcacggcggatatcgaaattcgcgtaccgcactttggttatgccgaccgcattcaggagattcacattaaagtgatccatatcctgatccagttgattgaaaaagagatggttaagtaagtctggcgtaggccggataagacgtttacgccgcatccggcatttgtgcgctgatgcctgatgcgacgctgacgcgtcttatcatgcctacaaatctgtacgcgaaccgtaggccgaataatgcgttcacgccgcatccgacctgaaaattcttaaatcaatcttcgccgggggccatgcgctcccgctgttgtggaggttacccatgtgcgaattgctcgggatgagcgccaacgtccctaccgatatctgctttagtttcaccgggcttgtacagcgtggtggtggaaccgggccacataaagatggctggggcattaccttttacgaaggtaaaggctgtcgcacatttaaagatccacaacccagctttaattcccccatcgccaaacttgtccaggactacccgataaaatcctgtagcgtggtggctcatattcgccaggctaatcggggcgaggtggcgctggaaaatactcacccatttacccgcgagttatgggggcgtaactggacttatgcccataacggacaactgacgggctacaaaagtctggaaaccggcaacttccgcccggtaggcgaaaccgacagcgaaaaagccttctgctggctcctgcataaattaacgcagcgttacccgcgcacaccgggcaacatggcggcggtatttaaatatatcgccagtctggcggatgaactgcggcagaagggcgttttcaacatgctgcttagcgacgggcgctatgtaatggcgtattgcagcactaatttacactggatcacccgccgcgcgccgtttggcgtggcaacgttgctggatcaggatgtggaaatcgacttcagcagccagaccacaccgaatgatgtggtcacggtgattgcaacacagccgctgacgggcaatgaaacctggcaaaagattatgccaggcgaatggcgcttattttgcctcggggagcgtgtagtttgattattttgcctcggggagcgtgtagttacttgccagttgtggctgcacaacttcgtggcttaacggcttgctgaccacgtaacgaccattgaccacagaaacggttggtggcttacgggtttgctcaaagtagtcgtaacccggcttcagttgctcccagaagtccttaaagttggaatatttatggcgcttcatattggcgtcggtcatgcggaacgggtaaatactcacttgcacgctcggctgaccaaacaccagcgcaccagtaacgaactggaatatctcatcaataccctgattggtcattgcgtagcagccgatggaaacacaatcgccgtggatcatcaggtatttcccttcataaccatgcgcacggtcataggcattggggaaaccaatattaatcgctttgtagtaacggctgtctggttttaactgattacgctggacgctataaaacccttccgggcttttgaaatcgccctgacgctgttttggccctaagccgccggaatatttacagattttatagctgtcgagcagttgatattgctcgcccattttgacgtagagatcgagcgtacgttcttccttgaagatctggatgtagacaggggatcccatcaactgctgcttatactctttgctcacaggcgtggtagagctactgctgcccagcaaaccggcaaaactaacgcacgggatcaacaacatcgcaagaattaatgcgattttacgcatactgcttattccttgataaaacggttacacacgccaggacggcaaaatggatcccaaatcggaatagtctggatttggaaggctcacattatcaccaaaagagttttacgcaagcctgtcggcgcagggtttacaaatttcatcggaagcgggctttacccaaagagcgccgcgtgagttccagttctctcaaatcgtaaaagtttatcggtaagtttgtaaatcaggatccagtccggttcgacatgagcatcgcgataacctttccaactaccttgcagcgggtggtctttataaacagctggaagcggtaaagtattattgataagaagcgtcataagatatttcaatttattcatatccttatgacgcttttgtgcaagttttacatccttactatattgtccgctgtattcaatatccctttgaatcatatttaaattcctaatttatcaaataaatcatcggcgtctttggccttatgaacatcaatgccagcttcgctgtttttgatactttgaatggttaattgattaggctcgcgtaaatcaaacggcaatgccttttcacgcgcgacctttgtgagggttatgcgaaccaggtcagagatggtcagccccatcccggccagtacgtccgctgcctgattcttcagatcttcatcgattcgggcgcgaacaaacgcgttagcagccattggggtatctcctgtgctgtatatttattcagcttgaattgtagctcaaatgagcaacagcgacaatccatgagtaatttaataaacggatgtttttacataattaactgaaatatatatgttaattttataataatggtttattaagtttgttcagaaacgatccgggatacactgcaacattaaagcatgaccagccattattgagtatgtccttgccgagcattccatcctttgtattgagcggattactgttgatttgtttgccgttttctagttttgccagcgccaccacaagtcatatctctttcagctacgccgcccgccagcggatgcaaaaccgtgcgcgtttattaaaacagtaccaaactcatctgaaaaagcaggccagctatattgtggaaggcaatgccgaaagcaaaagggcgctacgccagcacaaccgggagcagataaaacagcatccagaatggtttcctgctccgctcaaggcgagtgacagacgctggcaggcgctggcggaaaacaaccactttttaagcagcgaccatctgcataacattaccgaagtggcgattcaccgcctggagcagcagcttggcaagccttacgtctggggcggtacgcggcctgataaaggctttgactgtagcgggttggttttttatgcctacaacaagatccttgaggctaagctcccgcgcacggccaatgagatgtaccactatcgccgggcaacgattgtggcgaacaacgacctgcgccggggagatttgctgtttttccatatccacagccgcgagatagccgatcatatgggcgtgtatttgggcgatgggcaatttatcgagagcccacgtaccggcgaaaccattcggataagccgattagccgaacctttctggcaggaccattttttgggcgcgcgcaggattttgacggaagagacgattttgtaagacggataaggcgtttacgccgcatccggcagttgtacgcaggtgcctgatgcgacgctggcgcgtcttatcatgcctacgagcccgcgaatatttgcgagccgctttcccgatataaaacaacctcattgccaacctttccttttcttcttaccgttgagaaaaaggagtcgccatgtctgaatatcgtcgttattacatcaaggggggaacatggtttttcacggtgaatttacgaaatcgtcgaagccaacttttgaccacccagtaccagatgctccgtcacgccattattaaagttaagcgagacaggccttttgaaatcaacgcctgggtcgttttgccagagcatatgcactgtatctggacattacctgaaggcgatgatgatttttccagccgctggcgggaaattaaaaagcaatttacccatgcttgtggattgaaaaatatctggcaaccacgtttttgggagcacgccatccgcaataccaaagattataggcatcatgttgattatatttatataaatccagtaaagcatggttgggtaaagcaagtgagtgattggccattcagtacgttccatcgcgatgtcgcgcgagggttatatcccatcgattgggcgggggacgtaacggattttagtgccggggagcgtatcattagttaattgtgcgcagatgcctgatgcgacgctagcgcgtcttatcatgcctacaaacttgtgccggatcggtaggccggataaggcgtttatgccgcatccggcagttatgcgcagatgcctgatgcgacgctggcgcgtcttatcatgcctacaaacttgtgcctgaacggtaggacggataaggcgttcacgccgcatccggcagttgtgcaccaatgctggatacttacatcaacgcccccataatcttcaactccagctcatccggcacttcgttatacgacagcacatgcagccccggcgcaaacaaccttgcataacgcgccagcaaagggcgcagctgcggtggcaccagcagcaccgggtctttccccgccgctttcatctgctctttcacctgtggcatcgtactctggaactggttgagcatattcggatcgaccggcacgctgtcgagcatcactttcccgccctgttgcgcctgattcaccacgttggtcagcagattttccagctcattattcagcgtatacaccgtcagctcctgcttgcgaacgaacggatgggtaatgctgcgccgcaatgccaggcgcacatcggccgccagcagaatatgatctttcgtcaccgtgctactggcgaccagcacggtggcgatggtgacgatatcgcgcagggaaacgccttcggtcagcagcgcccggtacactttcagcaactggctgtaattgagcgccgcgctcaaatcttccgccagacgcggtgccgtcgacgataaacggttatgcaactgcgtaatatcatcatagttaaacaaatcaggaatatagctgcgcacaatcttatttacatgggtagcgatcacgctggcgctgtcgatcacctgataccccatattcagcgccttcgctttctgcgccgcctggatccaggtgaccggcatcccgtacgccgggtcgttcccctgcacgccgtcaatctcgccgtaggtttcgctggagggcagggccatcagtttatccgccggaatatccgcttcatcagcctttatgccgttgatgaaaatggcgtactgactgggcttaaggcggaagttttcccgaatgcggatctccggcagcagcacgccgttgccgtcagaaatcacctgccgcacgccgcgaatccgctgggtgagcgggttaccctgtgctttgtccaccagcgccaccagtttgtaaccgaggcttaaactgataggctcgatcagcggaatggtttcccaactgacctgctgctcgctggtttcggtgatggtgcgggtcagcgtttcgaggcttttctcttccgcctccgccgccagcggctgtttgctcatccgccagccggtaaaaccaagcagggcgctgaacagcaaaaacggcaggtgcggcattcccggtaccaccgccagcacgaacataatcccggtggcggtgtagagcaccgacgggcttgccagcagctggttacgcacgtcatgggcgatatcgccgttgtcgctgacgcgggtgacgataatcgccgccgcggtggagagcagcagggaagggatctgcgccaccaggccgtcgccgatggtcatcagcacatactgctggaaggcagcatcggcgctcaggttgtatttgaagatcccgatacagacgccgccgatcaggttgatcgccagaatcatcatcccggcgatggcgtccccgcgcacaaacttcgatgccccgtccatcgcgccgtagaaatcggcctcgctggcaacatctttacgccgggtttgcgcctgcgcctggttgatcaatccggcgttaagatcggcgtcaatcgccatctgtttgccgggcatcgcgtctaaggtaaagcgggcagaaacctcggaaatacgctcggcccctttggtgacgacaataaagttgattgtcaacagcgtcagtaaatccgagcgtgaaagcattatcgccgcgctgcacgggcagtcgatttttaacggtggtgggctgtcgccgttaaataaaatcagcccgtctcatccgccaaaacctgccaccgtggcggtgccggaagagacggagaaaaaagcgcgtgatgtgaatgagaaaacggcgctgctgaagaagaaatccgccaccgagcttggtgagctggcaaccagtatcaacaccattgcccgtgatgcgcatatggaagcgaatctggagatggagattgttccccagggattacgcgtgctgattaaagacgaccagaaccgcgatatgtttgaacgcggcagcgcgaagattatgccgttctttaaaacgctgctggtggagctcgcgccagtgttcgactcgctcgataataaaattattattaccgggcataccgatgcgatggcctacaaaaacaatatctacaacaactggaacctttcgggtgaccgcgcgctttcggctcgtcgggtgctggaagaggccggaatgccggaagataaagtgatgcaggtaagcgcaatggcggaccagatgctgctggattccaaaaatccgcaaagcgcgggcaaccggcgcattgagattatggtgctgaccaaaagtgcgtccgatacgctgtatcaatactttggtcagcatggggataaagtggtgcagccgctggtgcaaaagctggataagcagcaggtgctttcgcagcgaacgcgttaaatgctgaatctttacgcatttctcaaaccctgaaatcactgtatactttaccagtgttgagaggtgagcaatgcgtaaaatcattcatgtggatatggactgctttttcgccgcagtggagatgcgcgacaatcccgccctgcgcgatatccctattgctattggcggcagccgcgaacgtcggggggtgatcagcaccgccaattatcccgcgcgtaaatttggcgtacgtagcgctatgccgacagggatggcgctcaaattatgcccacatctcaccttgcttccggggcgctttgacgcctacaaagaagccagtaatcatatccgtgaaatcttcagccgctacaccagccgcattgaaccgttgagtctggatgaggcttatctcgatgtcaccgatagcgtccattgccacggttctgcgaccctcatcgcccaggaaatccgccagacaatcttcaacgagctgcaactgacggcgtctgcgggcgtggcaccagtaaagtttctcgccaaaatcgcctccgacatgaataaacccaacggccagtttgtgattacgccggcagaagttccggcatttttacaaaccttaccgctggcaaaaatccccggcgtcggcaaagtcagtgcggcaaaactggaagcgatggggctgcggacctgcggtgatgtacaaaagtgtgatctggtgatgctgcttaaacgctttggcaaatttggccgcattttgtgggagcgtagtcaggggattgacgaacgcgatgttaacagcgaacggttgcgaaaatccgtcggcgtggaacgcacgatggcggaagatattcatcactggtctgaatgtgaagcgattatcgagcggctgtatccggaacttgaacgccgtctggcaaaggtaaaacctgatttactgattgctcgccagggggtgaaattaaagttcgacgattttcagcaaaccacccaggagcacgtctggccgcggctgaataaagctgatctaatcgccaccgcgcgtaaaacctgggatgaacgccgcggcgggcgcggtgtgcgtctggtggggctgcatgtgacgttgcttgacccgcaaatggaaagacaactggtgctgggattatgatgtatactattatgtatattctggtgtgcattattatgagggtatcactgtatgcatcgaattctcgctgaaaaaagcgtcaatatcactgagttacgtaaaaacccagctaaatactttattgatcaaccggttgcggttctttctaataatcgccccgcaggatatctcttaagtgccagcgcattcgaagcgttaatggacatgcttgctgaacaagaggagaaaaagcccataaaggcgcgcttccgtccaagtgctgcaagattagaggaaattacacgccgcgctgaacaatatcttaatgatatgacggatgatgatttcaatgactttaaggaataaggatgcgggtattcaaaacaaaacttattcgcctgcaacttacagcagaggaacttgatgcgttaacggcggattttatttcctataagcgtgacggtgttttgccagatatatttggtcgcgatgcactctacgacgactcctttacctggccattaatcaaatttgagcgagttgctcatattcatctggcaaatgagaataatccatttccgccacagttgcgccaattcagcagaacgaatgacgaagcgcatttggtatattgtcagggggcgtttgatgagcaagcatggttgctcattgccattctgaaacctgaacctcataaactggctcgagataacaaccaaatgcataaaattgggaaaatggcagaagcgtttcgcatgcgtttttgaatttatattatgaataacatacaaataagaaactatcagcctggcgattttcagcaactatgcgctattttcattagagcggttacgatgaccgccagtcagcattatagtccacaacaaatttccgcctgggcgcagattgacgaatctcgctggaaggagaaactcgcgaaaagtcaagtgtgggttgcgatcattaatgcacaaccggttggttttatttcccgcattgaacattatatcgatatgttatttgttgaccctgaatacacccgccgtggggttgccagcgctttgttaaaacctttgattaagtctgaatccgaacttacggtggacgcaagcataaccgcaaaacccttttttgaacgttatggttttcagacagttaagcagcagcgcgttgaatgccggggagcgtggtttactaatttttatatgcgatataaaccgcaacattaaatccagcttgcaatgaaaataacgcccgcctggtatgtgcgcgttttctgattccacaaactgcaaggaggtaaatcatgacaaatcctttatcaatgactctttgcagacctttccaggattaattctttttttcttgccctggattcgtctgccatttcctgatttttatatttatatactctaaataattcgagttgcaggaaggcgacaagcgagtgaatcgccaggagcttacataagtaagtgactggggtgaacgaacgcagtcgcagtacatgcaacttgaagtatgacgagtataaatggaatggtacatgggcaaatatattcgtcccttatccgatgcggtatttaccatcgcatctgatgacctgtggatcgagagtttagcgatccaacaattacacaccacggcaaatttacccaacatgcagcgcgtagtggggatgccagatttacaccccggacgcggctacccgattggcgcagcgttcttctctgttggtcgtttttacccggcaagacgtcgcggtaacggtgctggaaacagaaacgggccgctactctgacacactgcgtagcgcgctggtttctctcgatggcgataacgcatgggcattaagcgaaagctggtgtggcactattcagtggatttgtccgagtccgtatcggcctcatcatgggcgcaaaaactggtttctgggcattgggcgttttaccgctgatgagcaggaacaaagcgatgcaatccgttatgagacgctgcgtagcagcgggccgggcggtcaacatgtcaataaaaccgacagcgcggtacgcgccacgcatttggcatccggtattagcgtgaaggttcagagtgagcgtagtcagcatgctaacaagcggctggcacgattgctgattgcctggaagctggagcaacagcaacaggaaaatagcgcggcgctgaaaagccagcggcgaatgttccatcaccagattgaacgtggcaacccgcgacggacatttacagggatggcttttatcgaaggataatgaaggatgaaactgccggaaggcgattaaacgccatccggcagcaaatcaaataattacttcgccggaatttctttcagcagttcagtcagcagtgtccagtaatgacctacgctttcgatgtgaacttgctcatccggagagtgtggaccggtgatagttggcccgatagaaaccatgtccatttccggatacggttttttgaacagaccacattccaggcccgcgtggataatctggatgttcggcgtcttgttgaacaggcgctgataggtttcacgtaccagatgcatcaccggagaattagcgtccggctgccagccaggatatgcgcctttcgcttcggttttcgcgccagccagtttacccaggctatccagcatgctcaccacgtagtctttaccgctgtcgatcagactacggatcaggcagtgaatttctacgttattgtcagtcatggtcaccacaccgacgttcagggaggtttcaaccacacctttggctacatcggagttacgaatcacaccgttcggggtggcgttcagcagacgaataaaggtatcgcgagatttcgcaatcagggcagctttatcgttcgctacagagtccagcaacaaggccagatttttctctttttctgccagctcgtttttcaggatctcctgataggtattcaccagagatttcaggacgtcgactttatcagctgcgacagcaatggtcgcaaaggcttcacgcgggatggcgttacgcagtgtgccgccgttgaaatcgataaggcgcagatccagttcttccgcatgacccgccaggaagcgcaccagcagtttgttggcattacccagcccaacgtggatttccccgccggagtgaccgcctttcagaccttttaaggttaacttgaaggtttcaaaaccagctggaaccgcttcacgatctaaatgcaggttggaggtgaagtcgataccccccgcacaacccatgtagatttcaccttcttcttcggagtcggtgttaatcagaatatcagcctgcaaccagttgccctgtaagccgaacgcaccgtccataccggcttcttcggtcatggtcagcagcacttccagcgggccgtgaaccacgttttcgtcagccagaaccgccagcgcagaggccataccaatgccgttatccgcacccagcgtggtgccgcgcgctttaacccattcgccatcaatataaggctggataggatctttcgtgaagtcatgcacggtgtcgttatttttctgcggcaccatatcgaggtgggcctgtaagacgaccggtttacgattttccatacctgcggtagcaggtttacgaatcaggatattacctacctgatcgcgttcgacatggaaacctttctcttttgcccaaccaacaatgtattcagcgagttgctcttcatgataggacgggtgaggaatagaacagattttggcaaaaatatcccacagcggctgtggagataattgagacagttcagacacgttaagtctccttgtcgatcacccgcaaaacagtattgcaggtcacagggttagcagaaaatgttgtcaacacaagacaggcttgcgagatatgtttgagaataccactttatcccgcgtcagggagaggcagtgcgtaaaaagacgcggactcatgtgaaatactggtttttagtgcgccagatctctataatctcgcgcaacctattttcccctcgaacactttttaagccgtagataaacaggctgggacacttcacatgagcgaaaaatacatcgtcacctgggacatgttgcagatccatgcacgtaaactcgcaagccgactgatgccttctgaacaatggaaaggcattattgccgtaagccgtggcggtctggtaccgggtgcgttactggcgcgtgaactgggtattcgtcatgtcgataccgtttgtatttccagctacgatcacgacaaccagcgcgagcttaaagtgctgaaacgcgcagaaggcgatggcgaaggcttcatcgttattgatgacctggtggataccggtggtactgcggttgcgattcgtgaaatgtatccaaaagcgcactttgtcaccatcttcgcaaaaccggctggtcgtccgctggttgatgactatgttgttgatatcccgcaagatacctggattgaacagccgtgggatatgggcgtcgtattcgtcccgccaatctccggtcgctaatcttttcaacgcctggcactgccgggcgttgttctttttaacttcaggcgggttacaatagtttccagtaagtattctggaggctgcatccatgacacaggcaaacctgagcgaaaccctgttcaaaccccgctttaaacatcctgaaaccagcacgctagtccgccgctttaatcacggcgcacaaccgcctgtgcagagcgcccttgatggtaaaaccatccctcactggtatcgcatgattaaccgtctgatgtggatctggcgcggcattgacccacgcgaaatcctcgacgtccaggcacgtattgtgatgagcgatgccgaacgtaccgacgatgatttatacgatacggtgattggctaccgtggcggcaactggatttatgagtgggccacccaggcgatggtgtggcaacaaaaagcctgtgcggaagacgatccgcaactcagtggtcgtcactggctgcatgcggctacgttgtacaacattgccgcctatcctcatctgaaaggagatgacctggccgagcaagcgcaggctttgagtaaccgcgcctatgaagaggccgctcagcgtctaccgggcacgatgcggcagatggagtttaccgtacccggcggtgcgcccatcaccggctttttgcatatgccgaaaggcgatggcccgttcccgacggtattaatgtgtggtggtctggatgcgatgcagacggactattacagcctgtatgaacgttattttgcgccgcgcggcattgcgatgctgactattgatatgccgagcgtgggcttttctagtaaatggaagctcacccaggactccagcctgttgcatcagcacgtcttaaaggcgctgcctaacgtaccgtgggtggatcacactcgcgtcgcggcctttggtttccgtttcggcgctaacgttgccgtgcgtctggcataccttgaaagcccgcgtctgaaagcggttgcctgtcttggtccggtagttcataccctgttgagtgattttaagtgccagcaacaggtgccggaaatgtatcttgacgttctggccagtcgtttggggatgcatgatgcttccgatgaagcgttgcgcgtggagctgaatcgctatagtttaaaagtgcaaggattgctgggacgtcgctgcccaacgccaatgttaagtggctactggaagaacgatccgttcagcccggaagaggacagtcgcttaatcaccagtagttctgctgacggtaaattattagagatcccatttaacccggtgtatcggaattttgacaaaggtcttcaggaaatcaccgactggatcgaaaaacgcttgtgttaaaaatttgctaaattttgccaatctggtaaaacagttgcatcacaacaggagatagcaatgacgttaccgagtggacacccgaagagcagattgatcaaaaaatttaccgcactaggcccgtatattcgtgaaggtaagtgcaaagataatcgattctttttcgattgtctggctgtatgcgtcaacgtgaaaccggcaccggaagtgcgtgaattctggggctggtggatggagctggaagcgcaggaatcccgttttacctacagttaccagtttggtctgttcgataaagcaggcgactggaagagtgttccggtaaaagacactgaagtggttgaacgactggagcacaccctgcgtgagtttcacgagaagctgcgtgaactgctgacgacgctgaatctgaagctggaaccggcggatgattttcgtgacgagccggtgaagttaacggcgtgagtgaaatgtgccggatgcatcacatccggcaatattcattaaaactgatacgtcatgccaaccgcgacaatatcatcattattaatattcaatttgttatcgctatccagttggttgattttataatcaacaaacgcactcatatttttgttgaaataatacgtagcaccgacgtcgatataattgaccagatcttcatcaccgataccttcaatatctttccctttgcttaagacataacccaggcttggacgcagaccaaagtcaaactggtattgagcgaccgcttcaaagttctgtgtcttattggcaaagccgccagttattggcgtcattttgcgtgtttcagaatagaaagttgccagataaatattattggcatcgtatttcagacctgttgcccatgcttctgcacgcttgcctgtgccacggctttgcaggttctgctcgttggtgcgatcactgttggtataggccccactaatggcgaaatcgctgccgccaaagtcatatgtcaaactcgtgccgaagccatcgccgttttgctttttaacgtcgcggttttcgtttttcccttgatattgcagggttaagttcaggccatcgataacgccgaagaagtcggtgttccgatacgtcgccagaccgctggcgcgtttggtcataaagttgtcggtctgcgcgctggaatcgccaccaaattccgggaacatatcggtccaggcttccacgtcatacaacgcccccaggttacgaccataatcgaaagaacccaaatctttatatttcaacccggcaaaagcgagacgcgttttttgctgtgcagtatcactctctgctttattaccggcaaactctgcttcccaacgaccataaccagtcagttgatcgttaatttgtgtttcgcctttgaaaccaaaacggatataactctggtcgccatctttactggcgttatcactcatataatgcatggctttaactttgccatagacatccagtttattaccgtctttattatatatttctgcagcctgtacagatgcagatgccacaatgcccatcaccactaatgccagagtgctctttttcattttcattcctgattttaattaacgcgcgaatattcagcgggagagtcccgttgaaaacaggaaagtttttaacctgagattgttaaagatatattacagattaataatattcttaaaatgtggtaatttattaaatctgtaataaaagcgtaaacaactgccgctaggcttgctgatcccgcgcaacaaaacgccatgctttgctcgcagatggttggcaaccgacgacagtcctgctaaaacgttcgtttgatatcatttttcctaaaattgaatggcagagaatcatgagtgacagccagacgctggtggtaaaactcggcaccagtgtgctaacaggcggaagccgccgtctgaaccgtgcccatatcgttgaacttgttcgccagtgcgcgcagttacatgccgccgggcatcggattgttattgtgacgagcggcgcgatcgccgccggacgtgagcacctgggttacccggaactgccagcgaccatcgccagcaaacaactgctggcggcggtagggcagagtcgactgattcaactgtgggaacagctgtttagcatttatggcattcacgtcgggcaaatgctgctgacccgtgctgatatggaagaccgtgaacgcttcctgaacgcccgcgacaccctgcgagcgttgctcgataacaatatcgttccggtaatcaatgagaacgatgctgtcgctacggcagagattaaggtcggcgataacgataacctttctgcgctggcggcgattcttgcgggtgccgataaactgttgctgctgaccgatcaaaaaggtttgtataccgctgacccgcgcagcaatccgcaggcagaactgattaaagatgtttacggcattgatgacgcactgcgcgcgattgccggtgacagcgttagtggcctcggaactggcggcatgagtaccaaattgcaggccgctgacgtggcttgccgtgcgggtatcgacaccattattgccgcgggcagcaagccgggcgttattggtgatgtgatggaaggcatttccgtcggtacgctgttccatgcccaggcgactccgcttgaaaaccgtaaacgctggattttcggtgcgccgccggcgggtgaaatcacggtagatgaaggggcaactgccgccattctggaacgcggcagctccctgttgccgaaaggcattaaaagcgtgactggcaatttcagccgtggtgaagtcatccgcatttgcaacctcgaaggccgcgatatcgcccacggcgtcagtcgttacaacagcgatgcattacgccgtattgccggacaccacagccaagaaattgatgcaatactgggatatgaatacggcccggttgccgttcaccgtgatgacatgattacccgttaaggagcaggctgatgctggaacaaatgggcattgccgcgaagcaagccagctataaattagcgcaactctccagccgcgaaaaaaatcgcgtgctggaaaaaatcgccgatgaactggaagcacaaagcgaaatcatcctcaacgctaacgcccaggatgttgctgacgcgcgagccaatggccttagcgaagcgatgcttgaccgtctggcactgacgcccgcacggctgaaaggcattgccgacgatgtacgtcaggtgtgcaacctcgccgatccggtggggcaggtaatcgatggcggcgtactggacagcggcctgcgtcttgagcgtcgtcgcgtaccgctgggggttattggcgtgatttatgaagcgcgcccgaacgtgacggttgatgtcgctagcctgtgcctgaaaaccggtaatgcggtgatcctgcgcggtggcaaagaaacgtgtcgcactaacgctgcaacggtggcggtgattcaggacgccctgaaatcctgcggcttaccggcgggtgccgtgcaggcgattgataatcctgaccgtgcgctggtcagtgaaatgctgcgtatggataaatacatcgacatgctgatcccgcgtggtggcgctggtttgcataaactgtgccgtgaacagagcacaatcccggtgatcacaggtggtataggcgtatgccatatttacgttgatgaaagtgtagagatcgctgaagcattaaaagtgatcgtcaacgcgaaaactcagcgtccgagcacatgtaatacggttgaaacgttgctggtgaataaaaacatcgccgatagcttcctgcccgcattaagcaaacaaatggcggaaagcggcgtgacattacacgcagatgcagctgcactggcgcagttgcaggcaggccctgcgaaggtggttgctgttaaagccgaagagtatgacgatgagtttctgagtttagatttgaacgtcaaaatcgtcagcgatcttgacgatgccatcgcccatattcgtgaacacggcacacaacactccgatgcgatcctgacccgcgatatgcgcaacgcccagcgttttgttaacgaagtggatagctccgctgtttacgttaacgcctctacgcgttttaccgacggcggccagtttggtctgggtgcggaagtggcggtaagcacacaaaaactccacgcgcgtggcccaatggggctggaagcactgaccacttacaagtggatcggcattggtgattacaccattcgtgcgtaaataaaaccgggtgatgcaaaagtagccatttgattcacaaggccattgacgcatcgcccggttagttttaaccttgtccaccgtgattcacgttcgtgaacatgtcctttcagggccgatatagctcagttggtagagcagcgcattcgtaatgcgaaggtcgtaggttcgactcctattatcggcaccattaaaatcaaattgttacgtaagatcttatcattctcccaccaaaaaattatcttaatgtaacagctggtgtaagtaaattctatcaacgaagatcaatcttatctactgaccaaaaaggcctgatagggcttcgctcactatacatccttggctgcaggtttagttgtacaccactcctaaatttaatgtgttggcaatgtgttcaataaagctcgaacaaattagctcattatgatcggttaatacttcaacttctggttgcatgattgtttgtccgtaaaaagataacgcgcctgccgggtagtagcaggcgcattacgcaataggtaaacaagggaggaagttcagaaatgtaaatcgggaaggttgtacgcaatgttcatcgtactacgttgttacggctttgccgcaacaagccagttgcctgccgcgctcgcagaatgtctgcagcccggagataaggagattgttcctgccagctaaatcccttcctgtcgatacgaaccagctcgtatttttctaccagaaaattcacggcatcggctagggtgataccggcatcgatagtctgtatcaggaatgttcgggttaaatatcagcaaaaagcccgcatcatgaatactggatatgaagcatgagagttacctcagtgtttatataaggattcggtccccctctctggaacggtaactctcaatctgatcggttcctgcgttagttcacatcacgactcattttttcgctctcaccggcatcccatttgccacaaaatatcccgccgtgctcctcggcagcgcttcctgtccacgaatcatatccgctattttctcgccaatcataattgtcgtggcgttcaaattcccggtgataatctgcggcataatgctcgcatccaccacacgcaggccttctaacccgtgtacgcggccttcgccgtcaaccacggacatctcgtcgtaacccattttgcaggtaccgcacggatggaaggcggtttcggcgtggttacgcacgaactcatcgagctgttcatccgtctggcattcgacaccggggctgatttcgcggccacgatactgatccagcgcgggttgatgcatgatctcgcgggtgatgcgaattgcgtcgcggaactcctgccagtcctgctcgtggctcatgtagttaaacagaatcgccggatgctggtgcgggtcgcgggatttaatccgcacatgcccacggcttgggctgcgcatactgccgacgtggcactggaaaccgtgctctttcactgcattgctgccgttatagttaatcgctactggcaggaaatggtactgaatattcggccacgcaaattcctcacggctgcgaataaatccacctgcttcaaagtggttgctggcaccaacgccagtgccgccaaacagccactccgcaccgattttcggctggttccaccactgcagggcagggtagagggaaaccggttctttgcactcatattgcagatacatctccagatgatcctgaagattttcgccgacgccgggtaattcatgcaccagcggaatatcaaactccgccagcagttcagcgttgccgacgccggagcgttgcaggatctgcggactggcaatcgcgcctgcacataacagcacttctttgttggccgttgcgcgggttgggatggtgctgtcgccttccagccattcgacgcccaccgcgcgtttgccgtcaaaaatgatgtgatcggtcatagcgtgagtacgaatggtcaggttaggacggcttttggcctgatcgagatagccacgcgcggtgctggcgcgacggccctgcggcgtgacggtgcgatccatcggaccaaaaccttcctgctgataaccgttgagatcgtccgtgcgcgggtagcccgcctgcacgcccgcttcaatcatcgcttcaaacagcggattgacgccgggtttggaggtagtgacgctcaccgggccatcaccgccgtgatagtcgttttcacccatatcgcgagtctcggccttgcggtagtagggcaggcagtcgaggtagctccagttctccagaccgggttcttgcgcccagttatcgagatccagcgcattgccacggatgtagcacatgccgttgatcaggctgcttccacccagacctttaccgcgtccgcactccatgcggcggttattcataaacggttcaggttccgtttcataggcccagttgtagcgtttaccctgtagcgggaatgccagggcagcgggcatctgggtgcggaagtcaaagcgatagtccgggccgcccgcttcaagcagcagcacggaggtattcggatcttcagtcagacgggtagcgagaacgttgccggcactgccggcaccaataatgatgtagtcaaattgcaaataaacctcctggttagaatatggactggaatttagccatctcaacctggatggacttcacctgggtgtaactctggagcgtcatcacgccgttctcgcgaccaatgccggagtgtttgtagccgccaacgggcatctctgccggggattcgccccaggtgttgatccagcaaatacccgcttccagctgatgaatgacgcgatgcgcgcggttcaggtccgctgtcacgatgcccgccgccaggccgtagtcggtatcgttagcgcggcgaatgacttcgtcttcgctctcgtaggtcagaatggacatcactggcccgaagatctcttcacgcacgatggtcatatcgtcgctgcaatcggtgaacactgtcggtgcaacccatgcgccgttatcgaagccatcgcctttcagtacatcgccgccgcacagtacgcgcgcgccttcctctttgcctttggcgatatagcgcagcacgttatcgcgatgcgggaagctgaccagcgggccgaagttagtttgcggatcgaaaacgtcgcccgcgcgaatgcgctcaacgcgcgccagaattttctgctcaaatgcggctttgcatttcgccggaacgaagacgcgggtgccattggtacacacctgaccggagctgaagaagtttgccatcatggcgatatcggcggcgagatcgagatccgcatcatcgaaaacgatcagcggacttttaccgcccagttccatggtcacttctttcagggaagaggccgcgctgttagccatcacttttttgccgctggcgacaccgccggtaaaactcactttggcaatgcccggatgctcggtcagatattgcccggtctccgcgcccacgcccggcaacacgttaaatacgccgtccggcaggcccgcttcgctgtaaatttcagccagctttaacgcggtaagcggggtaacttcgctcggtttgaaaatcattgcgttgcctgccgccagcgccggggcggatttccacagggcaatctggatcgggtagttccatgcgccaatccctgccactacgcccagcggttcgcggcgggtatacacaaaggacgtttcacgcaacgggatctggctgccttccagcgccgggatcagcccggcgtagtactccagcacgtccgcaccggtaacgatatcgacggtactggtttcgctatatgcttttccggtgtcgagggtttccagttttgcgagttcgtcattgcgttcacgcagaatatcaacggcccgacgcagaatacggctgcgctccatggcggtcatgctcgcccagattttttgcccctgctgggcgcttttcacggcgcgatcgacatcctcgcgcccggcggcctgcacggtcgccagcacgttaccgttggccgggttaatggtctcgaaggtgcgaccgctggtggcggaggtataaccaccatgtatataaagctgctgttctgccattcgggacatcacgtctcctcggttaatcggtgggtagatgctgagtgataaagtggcgggtcagggaattagcgcgggttttatccagcggtttgccgctcagagccgcgcgcagccataatccatcaatcagcgcggccaggccgtagcccgcttcctgtgcctgttcgcgcggcaattcgcgacgaaactcgctcaccagattgctcagcaagcggcggctgctgacctgctgtaaacgatagagcatcggctgatgcatactgctggcccagaacgccagccaggctttcatcgccgcactgctcacctgcgtttcatcgaagtttccgccaacaatcgcctgtaatcgctgctctgcactgccctgcggaagtgcatgtaatcgattcaaaaccgcgtcacgcagctgactggtgatatcgcgcatggttgcttccagcagaccatttttgtccctgaaatagtggctgatgatccccgtagaaacgcctgcacggcgggcgatctgcgcgatcgttgcatcgtgcatgcccacttcatttattgcttccagtgtggcgtcgatcagttgtctgcgccggatgctctgcatccccaatttgggcattttcgccactccattcatcagcggtgtttatctattaaagcggttattgattggacgttcaatataaaatgtgtcttaattgttacgaatttgattttaaatagtaacaataacagtggggatactggatgacagaccttagtcacagcagggaaaaggacaaaatcaatccggtggtgttttacacctccgccggactgattttgttgttttccctgacaacgatcctgtttcgcgacttcagcgccctgtggattggccgcacgctggactgggtttctaaaaccttcggttggtactatctgctggcggcaacgctctatattgtctttgtggtctgtatcgcttgtagccgttttggtagcgtgaagctcgggccagaacaatccaaaccggaattcagcctgctgagttgggcggcgatgctgtttgctgccgggatcggtatcgacctgatgttcttctccgtagccgaaccggtaacgcagtatatgcagccgccggaaggcgcgggacagacgattgaggccgcgcgtcaggcgatggtctggacgctgtttcactacggcttaaccggctggagcatgtatgcgctgatgggcatggcgctcggatactttagctatcgttataatttgccgctcaccatccgcagcgcgctgtacccgatcttcggtaaacggattaacgggccgataggtcacagtgtggatattgcagcggtgatcggcactatcttcggtattgccactacgctcggtatcggtgtggtgcagcttaactatggcttgagcgtactgtttgatattcccgatagcatggcggcgaaagcggcactgatcgccttgagcgtgataatcgccacgatctctgtcacctccggtgtcgataagggcattcgcgtgttaagcgagcttaatgtcgcgctggcgctgggattgatcctgttcgtattgtttatgggcgacactagcttcctgcttaatgcactggtgctgaatgttggcgactatgtgaatcgctttatgggcatgacgctcaacagttttgccttcgaccgtccggttgagtggatgaataactggacgctcttcttctgggcatggtgggtggcatggagcccgtttgtcggcttgttcctggcgcgtatcagccgtgggcgtaccattcgccagttcgtgctgggcacgttgattattccgtttaccttcacgctgttatggctcagcgtgttcggcaatagcgcgctgtatgaaatcatccacggcggcgcggcatttgccgaggaagcgatggtccatccggagcgcggcttctacagcctgctggcgcagtatccggcgtttacctttagcgcctccgtcgccaccattactggcctgctgttttatgtgaccagcgcggactccggggcgctggtgctggggaatttcaccagccagcttaaagatatcaacagcgacgcccccggctggctgcgcgtcttctggagcgtggcgattggcctgctgacgctcggcatgctgatgactaacgggatatccgcgctgcaaaacaccacggtgattatggggctgccgttcagctttgtgatcttcttcgtgatggcggggttgtataaatctctgaaggtagaagattaccgccgtgaaagtgccaaccgcgataccgcaccgcgaccgctggggcttcaggatcgcctgagctggaaaaaacgtctcagccgcctgatgaattatccgggcacgcgttacactaaacagatgatggagacggtctgttacccggcaatggaagaagtggcgcaggagttgcggttgcgcggcgcgtacgtggagctaaaaagcctgccaccggaagagggacagcagttgggtcatctggatttgttggtgcatatgggcgaagagcaaaactttgtctatcagatttggccgcagcaatatagcgtgccgggctttacctaccgcgcacgcagcggtaaaagcacctactaccggctggaaaccttcctgttagaaggcagccagggcaacgacctgatggactacagcaaagagcaggtgatcaccgatattcttgaccagtacgagcggcaccttaactttattcatctccatcgtgaagcgccgggccatagcgtgatgttcccggacgcgtgattgttattgcataaaaccgcgccatgtctgcatatggcgctgtttctcctacctcttgatacgttatatctatacggttaagcccttagtatctattgatgattaccagacaacagataataaaaaagaaaagaactattgcagcccaaaacctacatttgggctgttgcgaatgttcaataagtttagtcttatttaatgtaaatattgctgatcatttgaaatgacgcattattcatgagaaatgtgtatcgtaaatcaactgaaattaacgcaaccatttgttatttaaggtttaattatctgtgtgtgatattttattgaatgttttaaatattgtttttattggcattgctataatattggttatcatttgctgaatggattcagtcttaatgagtgggtttttaagggacaggcatagagtaatgatacgtatgcataaccaacatctttactcattatgtcattgaatgttgacgctatgtgtttatgagggagaggtattttcagttgatctggattgttaaattcatataatgcgcctttgctcatgaatggatgccagtatgtagtgggaaattataaatattgaaatagtccaactacttctttattaccaaaaatgagtatctgaattttaatattgcattcttgcgtgattatctcctgagtttgacttgtgattacctttttaaggtatttagcgtaactgtttttgagcgagcatcagaggtaaagataatcttcttgatagtgatgtgggatgttatacgtatggcatcgctgatgtttatggttaccccttatgtgtgctcaggaatcgacaggtaatcactcatactgaacagcgataaaagataaaggtgtgttcatgaatagttgtgattttcgtgtttttctgcaagagttcggtacaacggttcatttgagtttgcctggtagcgtatccgagaaagaacgactgctactcaagctgctgatgcagggaatgtctgtaacagaaataagtcagtacagaaatcgcagtgcaaagacaattagtcatcaaaagaaacagctctttgagaaactggggattcagagcgatattactttctggcgcgatattttctttcagtacaatccggagatcatatccgccacggggagtaatagtcacagatatattaatgataatcactatcaccatatcgtcacgcctgaagccatcagtctggcgttggaaaaccacgaattcaaaccgtggatccaaccggttttctgcgcgcagactggcgtactgacgggctgtgaggtgcttgtccgctgggaacatccacaaacgggaattatcccaccggatcagtttattcctctggcggagagttccggtcttattgtcataatgacccgccaactgatgaaacagactgcggatattctgatgccggtaaaacatttgctgccggacaatttccatattggcatcaacgtcagcgcgggttgttttttggcagcgggatttgaaaaagagtgtctgaacctggttaataaattaggtaacgataaaatcaagctggttctcgagctaacggaacgtaaccctattccggtaacgccagaagccagagcgatatttgacagccttcatcagcacaacattacctttgcgctggatgactttggtacgggttatgcgacctatcgttacttgcaggcgttcccggtcgattttattaagatcgataagagttttgtgcaaatggcgagtgtcgacgaaatctccggtcatattgtggacaatattgtcgaactagcgcgtaagcctggtctgagtatcgtggcggaaggggtagaaacccaggagcaggcggatttaatgatcggtaaaggcgttcactttttgcagggctatttgtactctccgccagtaccgggtaataaatttatctctgaatgggtaatgaaagcaggtggttgatgtaaaccgctattcacagcgcatcgggaggttggcagcgattaattctcccgatgcagtaaatcctgatagatccccgttaatatgccatttggcgcaaattgttttttaatccactgcgtcacctgacccgtagcagaatgctgagtcgccagtaacatgcggctatcctggcgcggattatggatttgtcgggtaaccagcagggattgcgtcatcgcctcacggaccatgtaatccggcaaaaaaccaattccttcacctaaaatctggcactgacatttggtgttgaaatctggcaccagaatactctcctgcccgtgcagcaaccagcccacttttttattaatcgtatgcgcggtgtcctccaccataatattagggtagagacgcagttggctttcggcgatgggttccggcacaaaggctaacgggtgatccggggcgatagcaaaagcccagcgaatcgcgccaatttcagtgtaatcaataccgccgccgtccagtagtgtatcgggtgcgccgatggcgatattggcctgattattaataatcgcatcccagacgccgttatacacttcggtggtgacggtaatctggcaggtaggaaactgctttttcagcacctgtaacaagcgtgcggtgtgtttgggcgtataaagcagctgattaatacaaatgcgcacacgcgcttctatgccctggctaatagtatcgattctgcgtttgatggcataaaaatcattcagcaggtcggtagctttgcggaaaaaataacgcccggactccgttaactcaatgctgcgggtactgcgagtgaacagcaccacatccagccccgtctccatacgcttaatggtgtagctaatggcggaagtggttaaacccaactcttctgcggctttactgaagctgccaaaacgcgcagcggtagtaaatgccaacagattctcttcggtaaaaatactgttcattaaaccattctcgccattatctactatgaatttctccagctatgactgtagaggtatcggttaaagatagataatcatttttgaataacttttaatacccgtcgcgtttagtcgtcgcttcgcttaatttttgtccaccatattcactaattacccccacgcagttacccgccagaaaacccagtaacgtcaccgtccagttcatcccgctggcaaaaaacagcgtcatgccgagaaagccaccgggaataaaggacagtaaccagaaacgcccttgccagaccactaccgcgctgaagggtacggtagtaattacgctcgcccagaacgcggacagtccacttacagaggccagccaaccagcagtcagcgcggcgaaaaacgcccacaccatcccggaataattaaccgccagacttctgataaacccgcttttaccgccgcctgcggcataaaaactgcaaaaggcgacgaagccaatggttcctaataattcccatccttgagagagcccgacatgactagacactaactgccaaagccctgcacaaataccgacggtgacacccgttgccgtgagtccgttcatcttgttcccctctggttagacatggacgaaagctactcttacatgtgcagactatagagaaataaaacctgattgagtgaaagggtatcgggtcaaagaaacaaatattgcactaccgcacactgcgaaaagattgttgaatattattcaacaaaaaggcgagatacggcgaattaaatttaagcgggttcttttatcagattatcgttgctattctcaattcatcgaaaacagccacaaaaaccaggggaatgtgaatgagtataaaaaatctacctgccgactatttattggctgcacaacagggtgatatcgataaagtaaaaacctgccttgcgctgggtgtcgatattaatacctgcgatcgtcaggggaaaacggcaattacgctggcaagtttatatcagcaatatgcttgcgttcaggcattaattgatgccggagcggatattaataagcaagattatacctgtttaaatccttttttaattagctgtctgaacgatgatttaacgctactacgaattattttaccggctaaacccgatcttaattgcgtaacccgttttggcggtgtcggcctgacgcctgcctgtgaaaaaggccatttaagtattgtaaaagagcttttggcgcatacggagattaacgttaaccagaccaaccatgtaggctggacgccgctactggaagcgattgtgcttaatgatggtggtattaaacagcaggcgattgtgcagttattgctggaacacggtgccagcccgcatctgaccgataaatatggcaaaacgccactggaactggcgcgggaacggggctttgaagagattgcgcagttactgattgccgcaggtgcataaaccgggaggcttgctatcaacacaccagaaagacggtgtgtgtgggcgctaactgcggatgcggattttctggcgcagcgggggcaaggacaggttgaacaggtctttgccagagcggtaaatatcgcactcccggctcgccagcagttgctgacgctgctttgtgaagagtacgacaatgcgccaaacagttgtcggttggcactcactcactttgatgatctgttccggcatggtgataaggttcagtttgacgatcaaggtattacggttggtcaacatcttcatatagagatgagtcgttgtcggcgttggctgtccccaaccttgcaaatgaccgctgtgaattttcaccttatcgcctggctacagtggcacgacattattcatcagcacctgggggaaaatgaaaccctgtttaattatcgcggcgataatccgttttatcaggcgttaaataaagaattacatattaaacgacgggcagttattcaggccgtaaacgataaacaaaatatcgccagtgcggtcgccagtatgatggggttagggattggccttacgccaagtgccgacgattatttaacaggtctggcgcttattttatttattcccgggcatccggcggaaaaatacaaagaggaattttatctcggtctgcaacgcggcaaaaataataccacattattaagtgccataacgctggaagccgcattacaacaacgctgccgggaaaatattcatcgttttattcacaacattatttatgacatccctgggaacgcaactcaggcaatagaaaaaattaaacatattggctccagttccggctgcgacatgctgtatggcatggccgatggttgtgcgctgagccaaacctacggagggaattatgtcagttaattaaccaaacctacggagggaattatgagtgttaaaatagtcattaaaccgaatacctattttgattctgtcagcctgatgtctatctccacgcgtgcaaataaactcgacggcgtcgagcaggcatttgtggcgatggcgaccgaaatgaataaaggcgtgctgaagaatttaggactgctgacgccggagctggagcaggcgaaaaacggcgacctgatgattgtcatcaatggtaaaagcggtgcggacaacgagcagttactggtggagattgaagaactgttcaacaccaaagcgcaaagcggcagccacgaggcgcgttacgccactattggcagcgccaaaaagcatatcccggaaagtaacctggcggtgattagcgtcaacggtctgtttgccgctcgcgaagcgcgtcaggcgctgcaaaacgatctcaacgtgatgctgttttccgataacgtcagtgttgaagatgaactggcgctcaagcaactggcccacgaaaaagggctgctgatgatggggccagactgtggcacggcgattatcaacggcgcggcgctctgttttggtaacgccgtgcgtcgcggcaacatcggtattgttggcgcatccggcaccggcagtcaggagttgagcgtccgcattcatgaatttggcggcggcgttagccaactgattggcaccggcgggcgcgacctgagcgagaaaatcggcggcctgatgatgctcgacgccatcgggatgctggaaaacgatccgcaaactgaaatcattgcgcttatctccaaaccgcctgcgcctgcggtggcccgcaaagtgctggaacgtgcgcgcgcctgccgcaagccggtggtcgtctgcttcctcgatcgtggcgaaacgccagtggatgagcaggggctacagtttgcccgcggcaccaaagaggcagcgctaaaagcggtgatgctctccggcgtgaaacaggaaaatctcgacctgcatacgcttaaccagccgttgattgcggatgtgcgtgcgcgtctgcaaccgcagcagaaatacattcgtggcctgttctgcggcggcacgctgtgcgacgaaaccatgttcgcggtgatggaaaaacatggcgatgtctacagcaacattcagcccgatccggaattccgcctgaaagatatcaaccgcagcatcaaacacaccttcctcgactttggcgatgacgacttcaccaatggcaagccgcacccgatgattgaccccaccaaccgcatcagtcgcttgatcgaagaggcgcgcgatccagaagtggcggtgatcgtgatggattttgtgctcggatttggaagccatgaagatccggtcggctccaccatcgagacgatcaaagaagcgaaagcgatcgccgctgccgaaggacgcgagttgatcattctcgcctatgtgctgggtaccgatcttgatacgccaagcttagaacaacaaagccagatgctgcttgatgccggagtgattctggcgagcagcagcaccaataccggattgctggcgcgtgaatttatctgcaaaggggaggaagcctgatgagccagagtctgtttagccaaccattgaacgttattaacgtcggcatcgccatgtttagcgatgacctgaaaaagcagcatgtagaagtgactcaactcgactggacgccgccggggcagggcaatatgcaggtggtgcaggcgctggataacattgccgatagcccgctggcggacaaaatcgccgccgctaaccagcaggcgctggagcgtattatccagagccatccggtgctgattggttttgatcaggcgattaacgtggtgccgggcatgacggcgaaaaccattcttcacgccgggccgccgatcacctgggaaaaaatgtgcggcgcgatgaaaggcgcggtcaccggagcgctggtgttcgaaggactggcgaaagatctcgacgaggcggctgaactggcggcttccggggagatcaccttcagcccgtgtcacgagcacgactgcgtgggaagcatggcgggtgttaccagcgccagcatgtttatgcacatcgtaaaaaacaaaacctacggcaacatcgcttataccaacatgagcgagcagatggcgaagattttgcgtatgggcgctaacgaccagagcgtgattgaccgcctgaactggatgcgtgatgtgcagggaccaatactgcgcgacgcgatgaaaattatcggcgaaatcgatctgcgcttaatgctggcgcaggcgctgcatatgggcgatgagtgccataaccgcaataacgccgggacgacactgctgattcaggcgctgacgccggggattattcaggcgggttattccgtcgagcaacagcgcgaagtgtttgagtttgtcgccagcagcgactacttctccggcccgacgtggatggcgatgtgtaaagcggcgatggatgcggcgcatggcatcgaatacagcaccgtggtcaccaccatggcgcgtaacggcgtcgagttcggcctgcgggtcagcggcctgccggggcaatggtttaccggcccggcgcagcaggtgatcggcccgatgtttgccggttataagccggaagatagcgggctggatatcggcgacagcgccatcaccgaaacctacggtattggcggatttgctatggcgaccgcgcccgctatcgtcgcgctggtgggcggcacggtggaagaagctattgatttctcccgtcagatgcgcgaaatcaccctcggtgaaaaccccaacgtcaccattccgctgctcggttttatgggcgtgccgagcgcaatcgacatcacccgcgtgggtagcagcggcattctgccggtgatcaacaccgccatcgcccataaagatgcgggcgtcggcatgattggcgcgggcattgtgcatccaccttttgcctgcttcgagaaagccattcttggctggtgcgaacgttacggcgtctgacctacatgttcatgccggatgcggcgtgaacgccttatccggcctacgaatggcgcaagaatctgtaggcctgataagcgtagcgcatcaggcatttgtcaccattgccggatgcggcgtgaacgccttatccggcctacgaatggcgcaagaatctgtaggcctgataagcgtagcgcatcaggcatttgccaccactgccggatgcggcgtggacgccttatccggcctacgagtggcgcgagaatctgtaggcctgataagcgtagcgcatcaggcatttgtcaccattgccggatgcggcgtgaacgccttatccggcctacgagtggcgcgagaattgtaagcctgataagcgtagcgcatcaggcagtctggcgttggtcataaccccatcaccctctgtagcggacataacaacatgaaagagcttgtggtcgttgccattggtggcaacagcattatcaaagataacgccagccagagcattgagcatcaggcggaggcggtgaaagccgtcgccgatacggtgctggaaatgctggcttccgattacgacattgtgctgacccacggcaacgggccgcaggtcgggctggatttacgccgtgcggagattgcccacaagcgcgaagggctgcccttaacgccgctggcgaactgtgtggcagatacgcagggcggcatcggctatctgatccaacaggcgctgaataaccggctggcgcgtcacggcgagaagaaagccgtcaccgtggtgactcaggtggaagtggataaaaacgatccaggttttgcccatcccaccaagcccatcggcgcattctttagtgacagccagcgtgacgaattacaaaaggcaaaccctgactggtgttttgttgaagatgccgggcggggctatcgccgcgtggtcgccagcccggaaccgaaacgtattgtcgaagcacctgccattaaagcgctgatccaacaaggttttgtcgtaattggcgcgggcggcggtggaattccggtagtgcgtactgacgcgggagattaccaaagcgtggacgcggttatcgacaaagatctctctaccgcgctgctggcccgtgaaattcacgccgacattcttgtgatcaccactggcgtcgaaaaagtgtgtattcactttggcaaaccgcagcagcaggcgctcgatcgggtggatattgccaccatgacccgctatatgcaggaagggcatttcccgcccggcagcatgttgccaaaaatcatcgccagcctgacatttttagaacaaggcggcaaagaagtgattatcaccacgccggaatgcctgcctgcggcgctgcgcggcgaaacgggcactcatattattaaaacgtaaggacgtaagatgaaagaaagcaatagccgccgtgaatttctgagccagagcggtaagatggtcaccgccgccgcgctgtttggtacctctgtgccgctcgcccatgcggcggtagctggcaccctaaactgcgaagcgaacaacaccatgaaaatcactgacccgcattactatctcgataacgtgctgctggaaaccggttttgactacgaaaatggcgtggcggtgcagacccgcacggcgcgccagaccgtggagattcaggacggcaaaattgtcgccctgcgcgagaacaagctgcatccggacgccacgctgccgcactatgacgctggcggtaagctgatgctgcccaccacccgcgacatgcatattcatctcgacaaaaccttttacggcgggccgtggcgcagcctcaatcgtccggcaggcaccaccatccaggacatgatcaaactcgagcagaaaatgctgccggaactgcaaccgtacactcaggagcgggcagaaaaactgattgatttattgcagagcaaaggcaccaccattgcccgcagccactgcaatatcgaaccggtttccggcctgaaaaatctgcaaaatttgcaggcggtgctggcgcgacgtcaggcgggctttgagtgtgaaatcgtcgccttcccgcagcacggtttgctgctgagcaaatctgaacctttaatgcgtgaagcgatgcaggcgggggcgcattacgtcggcggcctggacccgaccagtgttgatggcgcgatggaaaaatccctcgacaccatgttccagattgcgctggactacgacaaaggcgtcgatattcacctgcacgaaaccactccggcaggcgtggcagccatcaattatatggttgaaacggtagagaaaacgccacagctgaagggcaagctgaccatcagtcacgcctttgcgctggcaacgctcaacgagcaacaggtagatgaactggcgaaccggatggtggtgcaacaaatttctatcgccagcacggtgccgattggcacgctgcatatgccgctcaaacagttgcacgacaaaggcgtaaaagtgatgactggcactgacagcgttatcgaccactggagcccttatggtctgggcgacatgctggaaaaagccaatctgtacgcgcagctctatattcgtcctaacgaacagaacctctcccgcagcctgtttttagccactggcgatgtattgccgctgaatgaaaaaggcgagcgtgtatggccaaaagcgcaggatgacgccagctttgtgctggtggacgcctcctgttccgccgaggcggtggcgcgtatcagcccgagaaccgcaacgttccataaagggcaactggtgtgggggagtgtggcaggttgatgcgcatttgaaacgcctgcaacggtgaatagtaagagatttaagccccagggagtggggcaatctgaatatgagtgtgtcggcagaaatggacattatctttgaggaatatgcccttattgacgttgtgtagataactatttgtctacgtgaaaagatcatcagttttgccgattttagtcttttacagatagcaaatatcacacttacaggcgctcgccttatggggaacgttgctgctctgtttcattcaggctcgcggcatgttggggctggatcgggtggtttaaatattggctatattcaatggacgcgttttgccgcgatgacatatcaggcgttgccaaatacacatagctaatcaggagtaaacacaatgaagatcaaagctgttggtgcatattccgctaaacaaccacttgaaccgatggatatcacccggcgtgaaccgggaccgaatgatgtcaaaatcgaaatcgcttactgtggcgtttgccattccgatctccaccaggtccgttccgagtgggcggggacggtttacccctgcgtgccgggtcatgaaattgtggggcgtgtggtagccgttggtgatcaggtagaaaaatatgcgccgggcgatctggtcggtgtcggctgcattgtcgacagttgtaaacattgcgaagagtgtgaagacgggttggaaaactactgtgatcacatgaccggcacctataacagcccgacgccggacgaaccgggccatactctgggcggctacagtcaacagatcgtcgttcatgagcgatatgttctgcgtattcgtcacccgcaagagcagctggcggcggtggctcctttgttgtgtgcagggatcaccacgtatagcccgctacgtcactggcaggccgggccgggtaaaaaagtgggcgtggtcggcatcggcggtctgggacatatggggattaagctggcccacgcgatgggggcacatgtggtggcatttaccacttctgaggcaaaacgcgaagcggcaaaagccctgggggccgatgaagttgttaacagtcgcaatgccgatgagatggcggctcatctgaagagtttcgatttcattttgaatacagtagctgcgccacataatctcgacgattttaccaccttgctgaagcgtgatggcaccatgacgctggttggtgcgcctgcgacaccgcataaaagcccggaagttttcaacctgatcatgaaacgccgtgcgatagccggttctatgattggcggcattccagaaactcaggagatgctcgatttttgcgccgaacatggcatcgtggctgatatagagatgattcgggccgatcaaattaatgaagcctatgagcgaatgctgcgcggtgatgtgaaatatcgttttgttatcgataatcgcacactaacagactgaaaaaattaataaataccctgtggtttaacatattaacttcgctctccacttaactttttagttaaggagagcgaaataatatcaaagtagcagtaaaacctataacgtaaatttaaattgttaaattaacgccctccagtacacaatacttcacacgttagttatgagcgatttctgatagtgcctggtttaatcagagctttattatctgcgacgtttatttttatttaagagagatcgcgatgataagtttaaaagctccgcacaataatttgatgccatatacgcaacaaagcatacttaatacggttaaaaacaatcagttaccagaggatatcaaaagctccctggtttcctgtgtcgatatattcaaggttttgattaaacaatattatgattatccttatgattgtcgtgatgatttagtcgatgacgacaaactcattcatctcatggctgccgtacgagactgtgagtggagtgacgataacgcactcaccataaatgtgcagtttaatgatttccctggattttatgactggatggattaccctgatcacccggttaagtttgtttttcacatacttgaaaatcaaaaagggacagtttgggtatatgaccaggatgatgcgtttcttgatattaaagcaaacgtgcaggctggacgctttaccgggcttaagaaattagtgcagtttatcgatagtgtgcgaacagattgcaaatgtattcttcttgaataccatatgcctttgctgagaattttccctaaagggaaagagtgtatgcatgtggaaaaatggcttcgcgaaatgagctctattccggagacagacgcgcccattaagcaggcgcttgcgcatggattattattacacttaaaaaatatctaccctgtttttcctgaaagtctggtgatgttattgctctctgttctggacgtaaaaacatacagagatgatgcgcgattaaatgaatggatatctaatagagtgcaggaattaggtgacagatattatcctgtaaataagcacgttaaaatccgctacactctttaattcagaaagggttccacctgcaagttgttattccacctgagagtgaatcgcaatgcaggtaatcatttcatctgtatatctgtatgccaactggcattccatctcttttttcgccgatattttgttgtgatcggcgacacttcgcttaaaaaagcaccagtagtggtttcgcagccatgcggtgtataaaaaatgatctcatgcagatgttttgtgaatgtgttggttgacattcatatgaaaaaaatcataattccatcatgtttgtgtggggtcttttctgtatcttacgcatcgcactcaagcctgacagaaaatatgctgtaaggctcatatcaaaaaccgccattagctcatcaggaagagcagacgacaaccaggattgttgtatggtacggggttcgaggcctcgatggcggtccaacttttcaaaactcttctgaatcagatccccttattaagttccctgcaaagtggaacattgccattgtttggctatagtggatggggcagaccaatgaaaaaagcccacacaggggagagtgggctgaaatgggaggctaaagacagtagtaaacttatcggaaataaggaccacgcattacgggggctaagtagcccgatggccgtgattcggcaaatcaggttgattacgtaaagagtaaattatctgctcaccgctgcgtcaccccttcgtaaatcaggcgtagcgcgaatacaccaataattgcaccaataacccgactggcaacgcgttgcatacgcccataagcacgacgcacagcgggcaaagaaaacgcctgactaagaaaaactcgccagataatacttgcgagcacaatccccgcccaggccattaaacgtgcccatgttggtgtttctgcatttaatgttacactgaaaatactgataaaaaataaaacggtttgcgggttagagagatcggtaattaatccgcggcgaaaaaagacataccagggggcgctaatcggttgttgtagtgtgctcatttgcggtgtactctggcggcgcatgctgcaccacgcaaaccataagagataagcgccgccgacgattctgataaggctaaaaatctcctcacactgcgtaattagcgttgcaagaccaaacaaacccaacccggaataaaatgcatcgcccagcgccacgcccagcccggtcagcacccctgcgcgtcgaccggaagccaggctggtttgtactaccacaaagagattggctcccggattaaaaaaagtaatcacgaacagtcctacggtcaggtaaacggcatgcaaaggatccatagtgatttcatccataaataagtgaactaactgcatcatatttctaccaaaaataatcgggtgcgagagagatcacaaagtgtcttatttccggttactggcgtttatgccctgactgaactaattattaatcaacccaataatgtgggtgggtgatagtgtgataacaactctggagccgtaatatgaaaataatctctaaaatgttagtcggtgcgttagcgttagccgttaccaatgtctatgccgctgaattgatgaccaaagcggaatttgaaaaagttgaaagccagtatgaaaaaataggtgatattagtaccagcaatgaaatgagcactgcagatgcaaaagaagatttgatcaaaaaagcggatgaaaaaggggctgatgtgttggtactgacctccggtcaaactgacaataagatccacggcacggcaaatatttataagaagaagtaattctgaatcctatgtaaacatctccgatgcgtaagtttatcggtgatcatctattgaaatttatgccggataaagcgttcgcgctgcattcggcagttcagcttttcagccgccgccagaacgtcgtccggctgatgcctaaataattcgccgctgctgttttatcgccattaaatttctccagtgcctgttgtggtgtcagtaagcgtggagcgggagttttcgcgctctcgcgcgccagttccggcagtagcagttgcataaactgcggcgttaaatccggcgtcggttccacacttaaaaacagcgccagtcgttccatcatattgcgcagttcacgaatattgcctggccagtcgtagtgcagcagcacagtttcacttgcctgtaacccctggcgtaatgcagcagaaaatggggcggagagcgccgccagagacactttcaaaaagctttccgccagcggaagaatatccgccacccgctcgcgcagtggtggcaattgcagacgcaaaatactcagccgataaaacagatcacggcgaaaacgtccttgctgcatatcttcttccagattgcagtgagtggcgctaatgacccgtacatctaccggaacaggctgatgcccgccgacgcgggtgacctctttttcttccagcacccgcagcagccgggtctgcaaaggtagcggcatttcgccaatctcatccagaaacagcgtaccgccgtgggcaatttcgaacagcccggcgcgacctccgcgtcggctgccggtaaacgccccttcctcatagccaaacagttctgcttccagcaggctttcggcaatcgccccgcagttgacggcaacaaacggatggctctttttgccctgtcgcgcatcgtggcgggcaaaatattcccgatgaatcgcctgggccgccagctctttgcccgtccccgtttccccctcaatcaacaccgccgcactggagcgggcatacagcaaaatagtctgccgtacttgttccatctgtggactttgaccgagcatatcgcccagcacgtaacgagtacgcagggcgttgcgggtggcatcgtgagtgttatggcgtaagctcatgcgcgtcatatccagcgcatcgctgaacgcctggcgcacggtggcggcggaatagataaaaattccggtcattccggcttcttctgccaaatcggtaatcagccctgcgccgaccaccgcttcggtgccgttagcttttagctcgttaatctgcccgcgtgcgtcttcctcggtaatgtagctacgttggtcgaggcgcaaattaaaggttttttgaaacgccaccagcgctggaatggtttcctgataggtgacaacgccgatagaagaggtgagttttccggcttttgccagtgcctgtaacacatcgtagccgctcggtttaatcaaaataactggcacactcaggcggcttttcaggtacgcgccgttagagccagccgcgatgatggcgtcacagcgttcgtttgccagtttcttgcggatgtaggtcactgctttttcaaagccaagctgaataggggtaatgttcgccaggtgatcaaactcgaggctgatatcgcgaaacagctcgaacaggcgcgttacagataccgtccagataaccggtttgtcgtcattaagccgtggtggatgtgccatagcgcaccgcaaagttaagaaaccgaatattgggtttagtcttgtttcataattgttgcaatgaaacgcggtgaaacattgcctgaaacgttaactgaaacgcatatttgcggattagttcatgactttatctctaacaaattgaaattaaacatttaattttattaaggcaattgtggcacaccccttgctttgtctttatcaacgcaaataacaagttgataacaaaggatgggctatgtctctacactctccaggtaaagcgtttcgcgctgcactgactaaagaaaatccattgcagattgttggcaccatcaacgctaatcatgcgctgttggcgcagcgtgccggatatcaggcaatttatctttctggcggtggcgtggcggcaggtagcctggggctgcccgatctcggtatttctacccttgatgatgtgctgaccgacattcgccgtatcaccgacgtttgtagcctgccgctgctggtggatgcggatatcggttttggttctagcgcctttaacgtggcgcgcaccgtgaaaagcatgattaaagccggtgcggcaggattgcatattgaagatcaggttggtgcgaaacgctgcggtcatcgtccgaataaagcgatcgtcagcaaagaagagatggtggatcggatccgcgcggcggtggatgcgaaaaccgatcctgattttgtgatcatggcgcgcaccgatgctctggcggtagaggggctggatgcggcgatcgagcgtgcgcaggcctatgttgaagcgggtgccgagatgttgttcccggaggcgattaccgaactcgccatgtaccgccagtttgccgatgcggtgcaggtgccgatcctcgccaacatcaccgaatttggtgccacgccgctgtttaccaccgacgaattacgcagcgcccatgtcgcaatggcgctgtacccacttagtgcgttccgcgccatgaaccgcgccgctgaacatgtctacaacgtcctgcgccaggaaggcacgcagaaaagcgtcatcgacaccatgcagacccgcaacgagctgtacgaaagcatcaactactaccagtacgaagagaagctcgacaacctgtttgcccgtagccaggtgaaataaaaaacgcccgttgattgtattcgacagccgatgcctgatgcgtcgctgacgcgacttatcaggcctacgaggtgcactgaactgtaggtcggataagacggatggcgtcgcatccgacaaccgatgcctgatgcgccgctgacgtgacttatcaggcctacggggtgcactgaactgtaggtcggataagacgcatagcgtcgcatccgacaaccgatgcctgatgcgccgctgacgcgacttatcaggcctacggggtgcactgaactgtaggtcggataagacgcatagcgtcgcatccgacaaccgatgcctgatgcgccgctgacgcgacttatcaggcctacggggtgaactgaactgtaggtcggataagacgcatagcgtcgcatccgacaacaatctcgaccctacaaatgataacaatgacgaggacaacatgagcgacacaacgatcctgcaaaacagtacccatgtcattaaaccgaaaaaatctgtggcactttctggcgttccggcgggcaatacggcgctctgcaccgtgggtaaaagtggcaatgacctgcattaccgcggctacgatattcttgatctggcgaaacattgcgaatttgaagaagtggcgcatctgctgatccacggcaaactgccgacccgtgacgaactcgccgcttacaaaacgaaactgaaagccctgcgcggtttaccggctaacgtgcgtaccgtgctggaagccttaccggcggcgagccacccgatggatgttatgcgcaccggtgtttccgcgctcggctgcacgctgccagaaaaagaggggcataccgtctctggcgcgcgggatattgccgacaaactgctggcgagccttagcagcattctcctttattggtatcactacagccacaacggcgaacgcatccaaccggaaaccgatgacgactccatcggcggtcacttcctgcatctgctgcacggcgaaaagccaagccaaagctgggaaaaggcgatgcatatcagcctggtgctgtacgccgaacacgagtttaacgcctccacctttaccagtcgggtgattgcgggcaccggctctgatatgtattccgcgattattggcgcgattggcgcactgcgcgggccaaaacacggcggggcgaatgaagtgagcctggagatccagcaacgctacgaaacgccggacgaagccgaagcagatatccgcaagcgcgtggaaaacaaagaagtggtcattggttttggtcatccggtttacaccatcgctgacccgcgccaccaggtgattaaacgtgtggcgaagcagctcagccaggaaggcggcagcctgaagatgtacaacatcgccgatcgcctggaaacggtgatgtgggagagcaaaaagatgttccccaatctcgactggttctctgctgtttcctacaacatgatgggcgttcccaccgagatgttcacaccactgtttgttatcgcccgcgtcaccggctgggcggcgcacattatcgaacaacgtcaggacaacaaaattatccgtccttccgccaattatgttggaccggaagaccgcccgtttgtcgcgctggataagcgccagtaaacctctacgaataacaataaggaaacgtacccaatgagtgctcaaatcaacaacatccgcccggaatttgatcgtgaaatcgttgatatcgtcgattacgtcatgaactacgaaatcagctctaaagtggcctacgacaccgcacattactgcctgctcgacacgctcggctgcggtctggaagctctcgaatacccggcctgtaaaaaactgctggggccaattgttcccggcaccgtcgtacccaacggcgtgcgcgtccccggaactcagttccagctcgaccccgtccaggcggcatttaacatcggcgcgatgatccgctggctcgatttcaacgatacctggctggcggcggagtggggccatccttccgacaacctcggcggcattctggcaacggcggactggcttagccgcaacgcggtcgccagcggcaaagcgccgttgaccatgaaacaggtgctgaccgcaatgatcaaagcccatgaaattcagggctgcatcgcgctggaaaactcctttaaccgcgtcggcctcgaccacgttctgttagtgaaagtggcttccaccgccgtggtcgccgaaatgctcggcctgacccgcgaggaaattctcaacgccgttagcctggcgtgggtggacggtcagagcctgcgcacctatcgccatgcgccgaacaccggcacgcgtaaatcctgggcggcgggcgatgccacttcccgcgcggtacgtctggcactgatggcgaaaacgggcgaaatgggttacccgagtgccctgactgcgccggtgtggggcttctacgacgtctcctttaaaggtgaaagcttccgcttccagcgcccgtacggttcctacgttatggaaaatgtgctgttcaaaatctccttcccggcggagttccactcccagacggcagttgaagcagcgatgacgctctatgaacagatgcaggcagcaggcaaaacggcggcggatatcgaaaaagtgaccattcgcacccacgaagcctgtattcgcatcatcgacaaaaaagggccgctcaataacccggcagaccgcgatcactgcattcagtacatggtggcgatcccgctgctattcgggcgcttaacggcggcagattacgaggacaacgttgcgcaagataaacgcattgacgccctgcgcgagaagatcaattgctttgaagatccggcatttaccgctgactaccacgacccggaaaaacgcgccatcgccaatgccattacccttgagttcaccgacggcacacgatttgaagaagtggtggtggagtaccccattggtcatgctcgccgccgtcaggatggtattccgaaactggtcgataaattcaaaatcaatctcgcgcgccagttcccgactcgccaacagcagcgcattctggaggtttctctcgacagagctcgcctggaacagatgccggtcaatgagtatctcgacctgtacgtcatttaagtaaacggcggtaaggcgtaagttcaacaggagagcattatgtcttttagcgaattttatcagcgtagcattaacgaaccggagcagttctgggccgagcaggcccggcgtattgactggcagacgccctttacgcaaacgctcgatcacagcaatccgccgtttgcccgttggttttgtgaaggccgaaccaacttgtgccacaacgccatcgaccgctggctggagaaacagccagaggcgctggcgctgattgccgtctctagcgaaacagaagaagagcgcacctttacctttcgtcagctgcatgacgaagtgaacgcggtggccagtatgttgcgtagtttgggtgtgcagcgcggcgatcgggtgctggtgtatatgccgatgattgccgaagcgcatattactctgctggcctgcgcgcgcattggcgctattcacagcgtggtgtttggtggatttgccagccacagcgtggcggcgcgaattgatgacgctaaaccggtgctgattgtcagcgctgatgccggagcgcgcggtggcaaaatcattccctataaaaaattgctcgacgatgcgataagtcaggcgcagcaccagccacgccatgttttgctggtggatcgcgggctggcgaaaatggcgcgcgtcagcgggcgggatgtcgatttcgcgagcttgcgccatcaacacatcggcgcgcgggtaccggtggcgtggctggaatccaacgaaacctcctgcattctctacacttccggcacgaccggcaaacctaaaggcgtgcagcgtgacgtcggcggatatgcggtggcgctggcgaccagcatggacaccatttttggcggcaaagcgggcagcgtgttcttttgcgcaagcgatatcggctgggtggtggggcatagctatatcgtttacgcgccgctgctggcggggatggcgactatcgtttacgaaggattgccgacctggccggactgcggcgtgtggtggacaatcgtcgagaaatatcaggttagccggatgttcagtgcgccgaccgccattcgcgtgctgaaaaaattccctaccgctgaaattcgcaaacacgatctcagcagcctggaagtgctctatctggctggagaaccgctggacgagccgaccgccagttgggtgagcaatacgctggatgtgccggtcatcgacaactactggcagaccgaatccggctggccgattatggcgattgctcgcggtctggacgacaggccgacgcgtctgggaagccccggtgtgccgatgtatggctataacgtgcagttgcttaatgaagtcaccggcgaaccgtgtggcgtcaacgagaaagggatgctggtggtggaagggccgctgccgccggggtgtattcagaccatctggggcgacgacggccgctttgtgaagacttactggagcctgttttcccgcccggtgtacgccacctttgactggggcatccgtgacgctgacggttatcactttattctcgggcgcactgacgatgtaattaacgttgccgggcatcggctggggacgcgcgagattgaagagagtatctccagccatccgggcgttgccgaagtggcggtggttggggtgaaagatgcgctgaaagggcaggtggcggtggcgtttgtcattccgaaagagagcgacagtctggaagatcgtgatgtggcgcacagccaagagaaggcgattatggcgctggtggacagccagattggcaactttggccgcccggcgcacgtctggtttgtcagccaattgccaaaaacgcgatccggaaaaatgctgcgccgcacgatccaggcgatttgcgaaggacgcgatcctggagatctgacgaccattgatgatcctgcgagcttggatcagatccgccaggcgatggaagagtaagttattgtcggatgcgtcgcgcggtgcatccggcactgtgtgccgatgcctgatgcgacgctgacgcgttttatcatgcctacggacctgaaccgtaggtcggataaggcgctcgcgtcgcatccgacaccatgctcagatgcctgatgcgacgctgacgcgtcttatcaggcctacccactgtttttacaccgataatttttcccccacctttttgcactcattcatataaaaaatatatttccccacgaaaacgattgctttttatcttcagatgaatagaatgcggcggattttttgggtttcaaacagcaaaaagggggaatttcgtgagccaagataacaactttagccaggggccagtcccgcagagcgcgcggaaaggggtattggcattgacgttcgtcatgctgggattaaccttcttttccgccagtatgtggaccggcggcactctcggaaccggtcttagctatcatgatttcttcctcgcagttctcatcggtaatcttctcctcggtatttacactagttttctcggttacattggcgcaaaaaccggcctgaccactcatcttcttgctcgcttcagctttggtgttaaaggcagttggctgcctagtctgctactgggcggaactcaggttggctggtttggcgtcggtgtggcgatgtttgccattccggtgggtaaggcaaccgggctggatattaatttgctgattgccgtttccggtttactgatgaccgtcaccgtcttttttggcattagcgcgctgacggttcttagcgtgattgcggttccggctatcgcctgcctgggcggttattccgtgtggctggctgttaacggcatgggcggcctggacgcattaaaagcggtcgttcccgcacaaccgttagatttcaatgtcgcgctggcgctggttgtggggagttttatcagtgcgggtacgctcaccgctgactttgtccggtttggtcgcaatgccaaactggcggtgctggtggcgatggtggcctttttcctcggcaacagcttgatgtttattttcggtgcagcgggcgctgcggcactgggcatggcggatatctctgatgtgatgattgctcagggcctgctgctgcctgcgattgtggtgctggggctgaatatctggaccaccaacgataacgcactctatgcgagcggtttaggtttcgccaacattaccgggatgagcagcaaaacccttagcgtaatcaacggtattatcggtacggtctgcgcattatggctgtataacaattttgtcggctggttgaccttccttagcgcagctattcctccagtgggtggcgtgatcatcgccgactatctgatgaaccgtcgccgctatgagcactttgcgaccacgcgtatgatgagtgtcaattgggtggcgattctggcggtcgccttggggattgctgcaggccactggttaccgggaattgttccggtcaacgcggtattaggtggcgcgctgagctatctgatccttaacccgattttgaatcgtaaaacgacagcagcaatgacgcatgtggaggctaacagtgtcgaataactaagacgcatgtggaggctaacagtgagcaataacgctttacaaacaattattaacgcccggttaccaggcgaagaggggctgtggcagattcatctgcaggacggaaaaatcagcgccattgatgcgcaatccggcgtgatgcccataactgaaaacagcctggatgccgaacaaggtttagttataccgccgtttgtggagccacatattcacctggacaccacgcaaaccgccggacaaccgaactggaatcagtccggcacgctgtttgaaggcattgaacgctgggccgagcgcaaagcgttattaacccatgacgatgtgaaacaacgcgcatggcaaacgctgaaatggcagattgccaacggcattcagcatgtgcgtacccatgtcgatgttagcgatgcaacgctaactgcgctgaaagcaatgctggaagtgaagcaggaagtcgcgccgtggattgatctgcaaatcgtcgccttccctcaggaagggattttgagctatcccaacggtgaagcgttgctggaagaggcgttacgcttaggggcagatgtagtgggggcgattccgcattttgaatttacccgtgaatacggcgtggagagcctgcataaaaccttcgccctggcgcaaaaatacgaccgtctcatcgacgttcactgtgatgagatcgatgacgagcagagccgctttgtcgaaaccgttgctgccctggcgcaccatgaaggcatgggcgcgcgagtcaccgccagccacaccacggcaatgcactcctataacggggcgtataccagtcgcctgttccgcttgctgaaaatgtccggtattaactttgtcgccaacccgctggtcaatattcatctgcaaggacgtttcgatacgtatccaaaacgtcgcggcatcacgcgcgttaaagagatgctggagtccggcattaacgtctgctttggtcacgatgatgtcttcgatccgtggtatccgctgggaacggcgaatatgctgcaagtgctgcatatggggctgcatgtttgccagttgatgggctacgggcagattaacgatggcctgaatttaatcacccaccacagcgcaaggacgttgaatttgcaggattacggcattgccgccggaaacagcgccaacctgattatcctgccggctgaaaatgggtttgatgcgctgcgccgtcaggttccggtacgttatagcgtacgtggcggcaaggtgattgccagcacacaaccggcacaaaccaccgtatatctggagcagccagaagccatcgattacaaacgttgaacgactgggttacagcgagcttagtttatgccggatgcggcgtgaacgccttatccggcctacgtagagcactgaactcgtaggcctgataagcgtagcgcatcaggcaattccagccgctgatctgtgtcagcggctaccgtgattcattcccgccaacaaccgcgcattcctccaacgccatgtgcaaaaatgccttcgcagcggctgtctgccagctgtagtttatgccggatgcggcgtgaacgccttatccggcctacgtagagcactgaactcgtaggcctgataagcgtagcgcatcaggcaattccagccgcagacctgtgtcagcggttaccgactttcatttccgccaacaaccgcgcatttatccaacgccatgtgcaaaaatgccttcgcggcggctgtctgccagctatttttccgccgcaacaaaaccgccgttctctccagtagtggcggggcaagagaaatagctttaagcccgtcatgttgtgtggcaatcgctgctggtaacaatgtggaaagggaagtgcggcgaatcagctccagaaccgcgctaatactgttcgcctcaatgaccacctgtggatgtagccccgctttctcgcagtagtggtcaatttgctctctggtggcaaattccgcgctgagcaggaccagtttttcatcatgcaagcgactcaacgccacctgttcatggacggccagcggatgatgttgcgccacgactaacgctaaactttctgtcagtaaaggaattgcctccagctccgggctatgcacaggcgcgaaggcaatcccaacgtccaactcgtcgcggcaaagcatatcctcgattttctcctggctcatttcctgtagctggagcgtgatgctgggatagcgcgcatagaaatccgccattaaggggccgataaagtagctcgtaaaggtgggggtgacggcgatacgcaggcttcctcgcgtcagatcggcaacatcatgaatcgcccgtttacccgcccccagttcctgtaacgcccggctggcgtactgtcgccagacttctcctgcatcagtgagacgaatcgttcgcccgctacggtcaaacagcggcacgcctaaactctcctctaactggcgaatctgctgggaaagcgcaggttgggagacgtgcaacgcactggcggcacgggtgaagctgccatgttcagccacggcaagaaaataattgatatgtcgagagagcattcgcaacctataagtaaatccaatggaactcatcataaatgagacttttaccttatgacaatcggcgagtagtctgcctctcattccagagacagacagaggttaacggtgaaagagattattgatggattccttaaattccagcgcgaggcatttccgaagcgggaagccttgtttaaacagctggcgacacagcaaagcccgcgcacactttttatctcctgctccgacagccgtctggtccctgagctggtgacgcaacgtgagcctggcgatctgttcgttattcgcaacgcgggcaatatcgtcccttcctacgggccggaacccggtggcgtttctgctagcgtggagtatgccgtcgctgcgcttcgggtatctgacattgtgatttgtggtcattccaactgtggcgcgatgaccgccattgccagctgtcagtgcatggaccatatgcctgccgtctcccactggctgcgttatgccgatagtgcccgcgtcgttaatgaggcgcgcccgcattccgatttaccgagtaaagctgcggcgatggtacgtgaaaacgtcattgctcagttggctaatttgcaaactcatccaagcgtgcgcctggcgctcgaagaggggcggatcgccctgcacggctgggtctacgacattgaaagcggcagcatcgcagcttttgacggcgcaacccgccagtttgtgccactggccgctaatcctcgcgtttgtgccataccgctacgccaaccgaccgcagcgtaaccttatttttaaaccatcaggagttccaccatgattcagagtcaaattaaccgcaatattcgtcttgatcttgccgatgccattttgctcagcaaagctaaaaaagatctcagttttgccgagattgccgacggcaccggtctggcagaagcctttgtaaccgcggctttgctgggtcagcaggcgcttcctgccgacgccgcccgcctggtcggggcgaagctggatctcgacgaagactccattctactgttgcagatgattccactgcgtggctgcattgatgaccgtattccaactgacccaacgatgtatcgtttctatgaaatgttgcaggtgtacggtacaaccctgaaagcgttggttcatgagaaatttggcgatggcattattagcgcgattaacttcaaactcgacgttaagaaagtggcggacccggaaggtggcgaacgtgcggtcatcaccttagatggtaaacatctgccgaccaaaccgttctgacagccatgcgcaaccatcaaaagacgttcacgatgctgctggtactggtgctgattggtcttaatatgcgaccactgctcacctccgtcgggccactgctaccgcaattgcgccaggcgagcggaatgagctttagcgtggctgccctgttgaccgctctgccggtggttaccatgggcgggctggcgctggccggaagctggcttcatcagcatgtcagcgaacgtcgcagtgtcgccatcagtctgttgctgattgccgtcggtgcattgatgcgtgagctttacccgcaaagtgcgctgctgcttagcagcgcactgcttggtggggtggggatcggcatcattcaggcggtgatgcctagcgtgattaaacggcggtttcagcagcgcacgccactggtgatggggctgtggtccgcggctctgatgggcggcggtgggcttggtgccgccataacgccctggttagttcaacatagcgaaacctggtatcaaacactcgcctggtgggcgctgcctgccgttgttgcgctctttgcctggtggtggcaaagcgcccgcgaggtcgcctcttcccacaagacaacaaccactccggttcgcgtggtattcactccccgcgcgtggacgctgggtgtttacttcggtctgattaacggcggttacgccagcctgattgcctggttacccgctttctatattgagattggtgccagcgcgcagtacagcggttccttactggcattgatgacgcttgggcaagccgcaggagctttgctgatgcctgctatggctcgccatcaggatcggcgcaaactgttaatgctggcgctggtgttacaactggtggggttctgcggctttatctggctgccgatgcaattgccggtattgtgggcgatggtgtgtgggttaggtctgggcggcgcgtttccgctctgtttgctgctggcgctcgatcactctgtgcaaccggctattgctggcaagctggtggcgtttatgcagggaatcggttttatcatcgccgggcttgccccgtggttttctggcgtgctgcgtagtatcagcggcaattacctgatggactgggcatttcatgcgctgtgcgtcgttgggctgatgatcataaccctgcgttttgcaccagtacgttttccgcagctgtgggtcaaagaggcatgatgcgacgcttgttcctgcgctttgttcatgccggatgcggctaatgtagatcgctgaacttgtaggcctgataagcgcagcgtatcaggcaatttttataatttaaacactgctttcaactttataatctttgaaataatagtgcttatcccggtcgtttatttcgcgaataacccgacaaggaacgccagccgccacgacgtttggtggaatgtcttttgtgacgatactacccgcgccaataacagaattatccccgatggtgacgcctggattaataaccacatgacttccgatccagacgttattgccaatcgttatcggaaaagagtacatctcgccgttttttctcaattcatggtgtacagggtgtcccgtaacggaaagagtaacgttgggtgcaatcagtacgttatcaccgattgttaccgtgtagtcatcgacaatggttaaattgaaatttgcataaaaattgcggcctatatggatgttggaaccgtaagagaaatagacaggcggttctacccaggcgttttcccctaccgtggcaaacatttctttaatcaggctttctcttttttcaacttcacttggatggctgtgattaaactcatacattaacgttttcccacgaagtcttttttccggtaagccttcgcacatatcggtaaatagcttgcctgctcttattctttcggtcattggcatgttcaatgcgatcactccgttatgatatgttggtcggataaggcgctcgcgccgcatccgacattgattgcttaagcgacttcattcacctgacgacgcagcagggaaagcgggccggggccgctaagcgtgaacacggaaattaaggtgaagcccagcgccaccagacccagcaccagataagcgccctggaaaccgatgctttcatacatattgcccgccagtacagacataaaaatcatcgccagttgcttaaagaagcagaaacagaccagataaatcgtcgcactaaaacgcacttcaaactggctggtaatatatttaaagcagcccaccagcaggaacggtacttcaaacatatgcagcgttttcagaataaccacttccagcgcactggtggcgaagctactgccaataatacgtacagacataatagtgccagccagcagcagggcgtttttcccaccgatgcgattaatgatcagtggcgcaaagaacataatgctggcgttaagtaattcgcccattgtcgttacgtagccaaatacccgcgtaccctgttcaccggtagcaaagaagctagtaaagaaattagcaaactgttggtcaaaaacatcgtaggtgcaggaaacgccaataacatacagactcaaaaaccacagttttggctgtctgaacagttccagtgccagcttaaggctaaatgcgctatggttggcacctaccgcattggcaaccgtggcagaagagggcgcatccgttttggcgaaaaagagtaaaacggcgaggatgagtgcacagccagagcccagccagaaaacaaactgattattgatggtgaacatgatgccgacaatgctggcacacagcgcccagccaacacagccaaacatccgcgcgcgaccaaattcgaaattactgcgacggctgactttctcaataaatgcctctactgctggcgcaccggcgttaaaacaaaagcctagataaataccaccaacaatgcttcctactaaaatgttgtattgtaacagtggcccgaagataaaaataaagaacggcgcaaacatcactaacatgccggtaataatccacagcaggtatttgcgcagcccgagtttgtcagaaagcagaccaaacagcggttggaataataggctgaacagagaaatagcggcaaaaataatacccgtatcacttttgctgatatggttgatgtcatgtagccaaatcgggaaaaacgggaagtaggctcccatgataaaaaagtaaaagaaaaagaataaaccgaacatccaaaagtttgtgttttttaaatagtacataatggatttccttacgcgaaatacgggcagacatggcctgcccggttattattatttttgacaccagaccaactggtaatggtagcgaccggcgctcagctggaattccgcgcttacactcgggctccaggagtcgtcgccaccaatccccatatggaaaccgtcgatattcagccatgtgccttcttccgcgtgcagcagatggcgatggctggtttccatcagttgctgttgactgtagcggctgatgttgaactggaagtcgccgcgccactggtgtgggccataattcaattcgcgcgtcccgcagcgcagaccgttttcgctcgggaagacgtacggggtatacatgtcactcaatggcagatcccagcggtcaaaacaggcggcagtaaggcggtcgggatagttttcttgcggccctaatccgagccagtttacccgctctgctacctgcgccagctggcagttcaggccaatccgcgccggatgcggtgtatcgctcgccacttcaacatcaacggtaatcgccatttgaccactaccatcaatccggtaggttttccggctgataaataaggttttcccctgatgctgccacgcgtgagcggtcgtaatcagcaccgcatcagcaagtgtatctgccgtgcactgcaacaacgctgcttcggcctggtaatggcccgccgccttccagcgttcgacccaggcgttagggtcaatgcgggtcgcttcacttacgccaatgtcgttatccagcggtgcacgggtgaactgatcgcgcagcggcgtcagcagttgttttttatcgccaatccacatctgactaagaaagccactctggcggttaaattgccaacgcttattacccagctcgatgcaaaaatccatttcgctggtggtcagatgcgggatggcgtgggacgcggcggggagcgtcacactgaggttttccgccagacgccactgctgccaggcgctgatgtgcccggcttcactccatgcggtcgcgttcggttgcactacgcgtactgtgagccagagttgcccggcgctctccggctgcggtagttcaggcagttcaatcaactgtttaccttgtggagcgacatccagaggcacttcaccgcttgccagcggcttaccatccagcgccaccatccagtgcaggagctcgttatcgctatgacggaacaggtattcgctggtcacttcgatggtttgcccggataaacggaactggaaaaactgctgctggtgttttgcttccgtcagcgctggatgcggcgtgcggtcggcaaagaccagaccgttcatacagaactggcgatcgttcggcgtatcgccaaaatcaccgccgtaagcgctccacgggttgccgttttcatcatatttaatcaggctctgatccacccagtcccagacgaagccgccctgtaaacggggatactgacgaaacgcctgccagtatttagcgaaaccgccaagactgttacccatcgcgtgggcgtattcgcaaaggatcagcgggcgcgtctctccaggtaggctaagccattttttgatggaccatttcggcacagccgggaagggctggtcttcatccacgcgcgcgtacatcgggcaaataatatcggtggccgtggtgtcggctccgccgccttcatactgcaccgggcgggaaggatcgacagatttgatccagcgatacagcgcgtcgtgattagcgccgtggccactttcattccccaggctccagatgatcacactcgggtgattacgatcgcgctgcaccattcgcgttacgcgttcgctcatcgccggtagccagcgcggatcatcggtcagacgattcattggcaccatgccgtgggtttcaatattggcttcatccaccacatacaggccgtagcggtcgcacagcgtgtaccacagcggatggttcggataatggctacagcgcacggcgttaaagttgttctgcttcatcagcaggatatcctgcaccatcgtctgctcatccatgacctgaccatgcagaggatgatgctcgtgacggttaacgcctcgaatcagcaacggcttgccgttcagcagcagcagaccattttcaatccgcacctcgcggaaaccgacatcgcaggcttctgcttcaatcagcgtgccgtcggcggtgtgcagttcaaccaccgcacgatagagattcgggatttcggcgctccacagtttcgggttttcgacgttcagacgtagtgtgacgcgatcggcataaccaccacgctcatcgataatttcaccgccgaaaggcgcggtgccgctggcgacctgcgtttcaccctgccataaagaaactgttacccgtaggtagtcacgcaactcgccgcacatctgaacttcagcctccagtacagcgcggctgaaatcatcattaaagcgagtggcaacatggaaatcgctgatttgtgtagtcggtttatgcagcaagctgacgtcacggaaaatgccgctcatccgccacatatcctgatcttccagataactgccgtcactccagcgcagcaccatcaccgcgaggcggttttctccggcgcgtaaaaatgcgctcaggtcaaattcagacggcaaacgactgtcctggccgtaaccgacccagcgcccgttgcaccacagatgaaacgcgctgttaacgccatcaaaaataattcgcgtctggccttcctgtagccagctttcatcaacattaaatgtgaggctgtaacaacccgtcggattctccgtgggaacaaacggcggattgaccgtaatgggataggtcacgttggtgtagatgggcgcatcgtaaccgtgcatctgccagttactggggacgacgacagtatcggcctcaggaagatcgcactccagccagctttccggcaccgcttctggtgccggaaaccaggcaaagcgccattcgccattcaggctgcgcaactgttgggaagggcgatcggtgcgggcctcttcgctattacgccagctggcgaaagggggatgtgctgcaaggcgattaagttgggtaacgccagggttttcccagtcacgacgttgtaaaacgacggccagactatccgtaatcatggtcatagctgtttcctgtgtgaaattgttatccgctcacaattccacacaacatacgagccggaagcataaagtgtaaagcctggggtgcctaatgagtgagctaactcacattaattgcgttgcgctcactgcccgctttccagtcgggaaacctgtcgtgccagctgcattaaactatcggccaacgcgcggggagaggcggtttgcgtattgggcgccagggtggtttttcttttcaccagactgacgggcaacagctgattgcccttcaccgcctggccctgagagagttgcagcaagcggtccacgctggtttgccccagcaggcgaaaatcctgtttgatggtggttaacggcgggatataacaactgctgtcttcggtatcgtcgtatcccactacgctgatatccgcaccaacgcgcagcccggactcggtaatggcgcgcattgcgcccagcgccatctgatcgttggcaaccagcatcgcagtgggaacgatgccctcattcagcatttgcatggtttgttgaaaaccggacatggcactccagtcgccttcccgttccgctatcggctgaatttgattgcgagtgagatatttatgccagccagccagacgcagacgcgcgctgacagaacttaatgggcccgctaacagcgcgatttgctggtgacccaatgcgaccagatgctccacgcccagtcgcgtaccgtcttcatgggagaaaataatactgttgatgggtgtctggtcagagacatcaagaaataacgccggaacattagtgcaggcagcttccacagcaatggcatcctggtcatccagcggatagttaatgatcagcccactgacgcgttgcgcgagaagattgtgcaccgccgctttacaggcttcgacgccgcttcgttctaccatgctcaccaccacgctggcacccagttgatcggcgcgagatttaatcgccgcgacaatttggctcggcgcgtgcagggccagactggaggtggcaacgccaatcagcaagctctgtttgcccgccagttgttgtgccacgcggttgggaatgtaattcagctccgccatcgccgcttccactttttcccgcgttttcgcagaaacgtggctggcctggttcaccacgcgggaaacggtctgataagagacaccggcatactctgcgacatcgtataacgttactggtttcacattcaccaccctgaattgactctcttccgggcgctatcatgccataccgcgaaaggttttgcgccattcgatggtgtcaacgtaaatgcatgccgcttcgccttccggccaccagaatagcctggctttcaaccccttcttcgatctgttttgctacccgttgtagcgccggaagatgcttttccgctgcctgttcaatggtcattgcgctcgccatatacaccagattcagacagccaatcacccgttgttcactgcgcagcggtacggcgatagaggcgatcttctcctcctgatcccagccgcggtagttctgtccgtaaccctctttgcgcgcgcgcgccagaatggcttccagctttaacggttcccgtgccagttgatagtcatcaccggggcgggaggctaacatttcgattaattccttgcggtcttgttccgggcaaaaggccagccaggtcaggccgctggcggttttcagaagcggcaaacgtcgcccgaccattgcccggtgaaaggataagcggctgaaacggtgagtggtttcgcgtaccaccattgcatcaacatccagcgtggacacatctgtcggccataccacttcgcgcaacagatcgcccagcagtggggccgccagtgcagaaatccactgttcgtcacgaaatccttcgcttaattgccgcactttgatggtcagtcgaaaactatcatcggaggggctacggcggacatatccctcttcctgcagcgtctccagcagtcgccgcacagtggtgcgatgcaggccgctgagttccgccagcagcccgacgctggcaccgccatcaagtttatttaacatatttaataacattagaccgcgggttaagccgcgcacggttttgtattccgtctgctcattgttctgcatattaatactcatttctatagttaaaacaacgtggtgcacctggtgcacattcgggcatgttttgattgtagcgctaaacacccttcctatactgagcgcacaataaaaaatcatttacatgtttttaacaaaataagttgcgctgtactgtgcgcgcaacgacattttgtccgagtcgtgaggtactgaaatggcaatacaacaccctgacatccagcctgctgttaaccatagcgttcaggtggcgatcgctggtgccggcccggttgggctgatgatggcgaactatctcggccagatgggcattgacgtgctggtggtggagaaactcgataagttgatcgactacccgcgtgcgattggtattgatgacgaggcgctgcgcaccatgcagagcgtcggcctggtcgatgatgttctgccgcacactacgccgtggcacgcgatgcgttttctcaccccgaaaggccgctgttttgctgatattcagccaatgaccgatgaatttggctggccgcgccgtaacgcctttattcagccgcaggtcgatgcggtgatgctggaaggggtgagccgttttccgaatgtgcgctgcttgttttcccgcgagctggaggccttcagtcagcaagatgacgaagtgaccttgcacctgaaaacggcagaagggcagcgggaaatagtcaaagcccagtggctggtagcctgtgacggtggagcaagttttgtccgtcgcactctgaatgtgccgtttgaaggtaaaactgcgccaaatcagtggattgtggtagatatcgccaacgatccgttaagtacgccgcatatctatttgtgttgcgatccggtgcgcccgtatgtttctgccgcgctgcctcatgcggtacgtcgctttgaatttatggtgatgccgggagaaaccgaagagcagctgcgtgagccgcaaaatatgcgcaagctgttaagcaaagtgctgcctaatccggacaatgttgaattgattcgccagcgtgtctacacccacaacgcgcgactggcgcaacgtttccgtattgatcgcgtactgctggcgggcgatgccgcgcacatcatgccggtatggcaggggcagggctataacagtggtatgcgcgacgcctttaacctcgcatggaaactggcgttggttatccaggggaaagcccgcgatgcgctgctcgatacctatcaacaagaacgtcgcgatcacgccaaagcgatgattgacctgtccgtgacggcgggcaacgtgctggctccgccgaaacgctggcagggtacgttacgtgacggcgtttcctggctgttgaattatctgccgccagtaaaacgctacttcctcgaaatgcgcttcaagccgatgccgcaatattacggcggtgcgctgatgcgtgagggcgaagcgaagcactctccggtcggcaagatgtttattcagccgaaagtcacgctggaaaacggcgacgtgacgctgctcgataacgcgatcggcgcgaacttcgcggtaattggctggggatgcaatccactgtgggggatgagcgacgagcaaatccagcagtggcgcgcgttgggcacacgcttcattcaggtggtgccggaagtgcaaattcataccgcacaggataaccacgacggcgtactacgcgtgggcgatacgcaaggtcgcctgcgtagctggttcgcgcaacacaatgctagcctggtggtgatgcgcccggatcgctttgttgccgccaccgccattccgcaaaccctgggcaagaccctgaataaactggcgagcgtgatgacgctgacccgccctgatgccgacgtttctgtcgaaaaggtagcctgatatgcacgcttatcttcactgtctttcccacagcccgctggtggggtatgtcgacccggcgcaagaggtgctcgatgaggtcaatggcgtgattgccagcgcccgcgagcgtattgcggcattctcccctgaactggtggtgctgtttgcgccagatcactacaacggctttttctatgacgtgatgccaccgttctgtttaggcgttggagcgacggcaattggtgatttcggcagtgcggcaggagagctgcccgtgcctgtggagctggcggaggcctgtgcgcatgccgtcatgaagagcgggatcgatcttgccgtttcttactgtatgcaggtggaccacgggttcgcccagccgctggagttcctgctcggtgggctggataaggtgccagttctgcctgtgttcatcaacggtgtcgccacgccgctgcccggtttccagcgtacccgcatgttgggtgaagccattggacgtttcaccagcactctcaataaacgcgtgctgttcctgggttccggtgggctttcccatcagccgccggtgcccgaactggcgaaagccgatgcccatatgcgcgaccgtctgttggggagcgggaaagatttacccgccagtgagcgcgaattgcgtcagcaacgggtgattagcgccgctgagaagtttgttgaggatcagagaacgctgcatccgctcaacccgatttgggataaccagttcatgactttgctggagcagggacgcatacaggaactggatgccgtcagtaacgaagagctttccgccattgccggaaagagcacacatgaaatcaaaacctgggtcgccgcttttgccgctatttctgcgtttggcaactggcgtagcgaagggcgttattaccgcccaatcccggagtggattgccggatttggcagcttaagcgccagaacagagaactgaatatgcaggagaagatgatgagttatcagccacaaaccgaagccgccaccagccgttttctgaatgtagaagaagcgggtaaaacgctgcgcatccattttaatgactgcggacaaggcgacgaaaccgttgtcctgctgcatggttccggcccgggtgctactggctgggcgaacttcagccgcaatatcgatccgctggtagaggcgggctatcgggtgatcctgctggattgtccgggttggggcaagagcgatagcgtcgttaatagtggtagccgaagcgatcttaatgcacgaatcctgaaaagcgtggtggatcaactggatatcgccaaaatccacctgctgggcaacagcatggggggccatagttctgtggcgttcacccttaaatggccggagcgcgtcggcaaactggtgctgatgggcggcggtacgggcggcatgagtttgtttacgccgatgccaaccgaaggtattaagcgactgaatcagctttatcgtcagccgactatcgaaaacctgaagctgatgatggatatcttcgtttttgataccagcgatttgaccgacgccctgtttgaagcgcgcctgaataatatgctgagccgccgcgatcacctggaaaacttcgttaagagcctggaagctaatccgaaacagttcccggattttggcccacgtctggcggaaatcaaagcgcaaaccctgattgtctgggggcgcaacgaccgctttgtgccgatggatgcgggtctgcgtctgctgtccggcattgccggttctgaactgcatatcttccgcgactgtggtcactgggcgcagtgggaacatgccgacgctttcaatcaactggtgctgaatttcctcgcacgcccttaaggaatggtcatgacgaagcatactcttgagcaactggcggcggatttacgccgcgccgcagagcagggcgaagcgattgcaccgctgcgcgatctgattggtatcgataacgctgaagcggcttacgccattcagcacataaatgtgcaacatgacgttgcgcaggggcgtcgcgtggtagggcgtaaagtgggcctgacacatccgaaagtgcaacaacaactgggcgttgatcaaccggattttgggacgttatttgccgacatgtgttatggcgataacgaaatcattcctttttcccgtgttctgcaaccccgcattgaagcggagatcgcactggtgttgaaccgcgatttgcccgcaaccgatatcaccttcgacgaattgtataacgccattgaatgggtacttccggcgctggaagtggtggggagccgcattcgcgactggagcattcagtttgtcgataccgtggcagataacgcctcctgtggggtgtatgtcatcggcggtccggcgcaacgtccggcggggttagacctgaaaaactgcgccatgaagatgacgcgtaataacgaagaggtttctagcgggcgcggcagcgaatgcctgggacatccgcttaatgcggccgtctggctggcacgcaaaatggccagtctgggtgaaccgctgcgcaccggagatatcattcttaccggggcattaggtccgatggtggcggtgaatgcgggcgatcgttttgaagcccatattgaaggcataggtagtgttgctgcgacatttagtagcgcagccccaaaaggaagtctgagttgagctaagccccaaaaggaagtctgtcatgagtaagcgtaaagtcgccattatcggttctggcaacattggtaccgatctgatgattaaaattttgcgtcacggtcagcatctggagatggcggtgatggttggcattgatcctcagtccgacggtctggcgcgcgccagacgtatgggcgtcgccaccacccatgaaggggtgatcggactgatgaacatgcctgaatttgctgatatcgacattgtatttgatgcgaccagcgccggtgctcatgtgaaaaacgatgccgctttacgcgaagcgaaaccggatattcgcttaattgacctgacgcctgctgccatcggcccttactgcgtgccggtggttaacctcgaggcgaacgtcgatcaactgaacgtcaacatggtcacctgcggcggccaggccaccattccaatggtggcggcagttagtcgcgtggcgcgtgttcattacgccgaaattatcgcttctatcgccagtaaatctgccggacctggcacgcgtgccaatatcgatgaatttacggaaaccacttcccgagccattgaagtggtgggcggcgcggcaaaagggaaggcgattattgtgcttaacccagcagagccaccgttgatgatgcgtgacacggtgtatgtattgagcgacgaagctagtcaagatgatatcgaagccagtatcaatgaaatggctgaggcggtgcaggcttacgtaccgggttatcgcctgaaacagcgcgtgcagtttgaagttatcccgcaggataaaccggtcaatttaccgggcgtggggcaattctccggactgaaaacagcggtctggctggaagtcgaaggcgcagcgcattatctgcctgcctatgcgggcaacctcgacattatgacttccagtgcgctggcgacagcggaaaaaatggcccagagtctggcgcgcaaggcaggagaagcggcatgaacggtaaaaaactttatatcagcgacgtcacattgcgtgacggtatgcacgccattcgtcatcagtatagcctggaaaacgttcgccagattgccaaagcactggacgatgcccgcgtggatagcattgaagtggcccacggcgacggtttgcaaggttccagctttaactatggtttcggcgcacatagcgaccttgaatggattgaagcggcggcggatgtggtgaagcacgccaaaatcgcgacgttgttgctgccaggaatcggcactattcacgatctgaaaaatgcctggcaggctggcgcgcgggtggttcgtgtggcaacgcactgtaccgaagctgatgtttccgcccagcatattcagtatgcccgcgagctcggaatggacaccgttggttttctgatgatgagccatatgaccacgccggagaatctcgccaagcaggcaaagctgatggaaggctacggtgcgacctgtatttatgtggtggattctggcggtgcgatgaacatgagcgatatccgtgaccgtttccgcgccctgaaagcagagctgaaaccagaaacgcaaactggcatgcacgctcaccataacctgagtcttggcgtggcgaactctatcgcggcggtggaagagggctgcgaccgaatcgacgccagcctcgcgggaatgggcgcgggcgcaggtaacgcaccgctggaagtgtttattgccgccgcggataaactgggctggcagcatgggaccgatctctatgcgttaatggatgccgccgacgacctggtgcgtccgttgcaggatcgaccggtacgagtcgatcgcgaaacgctggcgctgggatacgctggtgtttacagcagcttcctgcgtcactgtgaaacggcggcggcgcgttatggcttaagtgcggtggatattctcgttgagctgggcaaacgccggatggttggcggccaggaggatatgatcgttgacgtggcgctggatctgcgcaacaacaaataatgatgactgccgagaacgtgcattttgtatgcccatcccagcacgactgccggatgcggcgtgaacgccttatccggcctacggatggcgtgagaatttgtaggtctgataagacgcgttagcgtcgcatcaggcatctgcgcacgactgccggatgcggcgtgaacgccttatccggcctacggatggcgcgggaatttgtaggcctgataagacgcgttagcgtcgcatcaggcatctgcgcacgactgccggatgcggcgtgaacgccttatccggcctacgggtggcgcgagaatttgtaggcctgataagacgcgttagcgtcgcatcaggcatctgcgcacgactgccggatgcggcgtaaacgccttatccggcctacggatggcgcgggaatttgtaggcctgataagacgcgttagcgtcgcatcaggcatctgcacacgactgccggatgcgataaacgtcttgtccggcctacatttcgcccgtaggcagtcattaaatagttctgattacgcggctggcaatgtatcagtcgcgattcacctgcactcgcaacgaggttcatcttatgagcactcgtacccctagtagttctagttcccgcctgatgctgaccatcgggctttgttttttggtcgctctgatggaagggctggatcttcaggcggctggcattgcggcgggtggcatcgcccaggctttcgcactcgataaaatgcaaatgggctggatatttagcgccggaatactcggtttgctacccggcgcgttggttggcggaatgctggcggaccgttatggtcgcaagcgcattttgattggcagtgttgcgctgtttggtttgttcagtctggcaacggcgattgcctgggatttccccagtctggtctttgcgcggctgatgaccggtgtcgggctgggggcggcgttgccgaatcttatcgccctgacgtctgaagccgcgggtccacgttttcgtgggacggcagtgagcctgatgtattgcggtgttcccattggcgcggcgctggcggcgacactgggtttcgcgggggcaaacttagcatggcaaacggtgttttgggtaggtggtgtggtgccgttgattctggtgccgctattaatgcgctggctgccggagagcgcggttttcgctggcgaaaaacagtctgcgccaccactgcgtgccttatttgcgccagaaacggcaaccgcgacgctgctgctgtggttgtgttatttcttcactctgctggtggtctacatgttgatcaactggctaccgctacttttggtggagcaaggattccagccaagccaggcggcaggggtgatgtttgccctgcaaatgggggcggcaagcgggacgttaatgttgggcgcattgatggataagctgcgtccagtaaccatgagcctactgatttatagcggcatgttagctagcctgctggcgcttggaacggtgagcagttttaacggtatgttgctggcgggatttgtcgcggggttgtttgcgacaggtgggcaaagcgttttgtatgccctggcaccgttgttttacagtagccagatccgcgcaacaggtgtgggaacagccgtggcggtagggcgtctgggggctatgagcggtccgttactggccgggaaaatgctggcattaggcactggcacggtcggcgtaatggccgcttctgcaccgggtattcttgttgctgggttggcggtgtttattttgatgagccggagaagtcgaatacagccgtgcgccgatgcctgacgtgccttattaggcaggggcgaaagggacttcaccccaatacacctacggcgtttacaggtatactcgctaaaaattattcagcgggtttggaaacaaagatggcaaaacttaccttacaagagcagttgctcaaagcaggattagtcaccagcaaaaaagcggcgaaggtggagagaacggcgaaaaaaagccgcgttcaggcgcgtgaagctcgggcggcggtagaagaaaataaaaaggcacagcttgagcgtgataaacagcttagcgaacagcaaaaacaagcggcgttggcgaaagaatataaagctcaggtgaagcagcttattgaaatgaaccgaatcaccattgccaatggcgatattggttttaacttcactgacggcaatctgattaagaagatttttgtcgataagctcacacaggcgcagttgattaatggtcgtctggcgattgcccgcttgttggtcgataacaatagcgaaggtgaatacgccattattcccgccagcgttgccgataaaattgctcagcgcgatgccagcagtatagtgttgcacagcgcgctcagcgccgaagagcaggatgaagacgacccgtatgccgacttcaaagtgcctgatgatttgatgtggtaaacatagataagtcgtgcgcagatgcctgatgcgacgctatgcgcgtcttatcaggcctacggtttatgggcgaagtgtagaccggataaggcgttcacgccgcatccggcagtcgtgcgccatgcctgatgcgacgctttgcgcgtcttatcaggcctacggcttacgggcgaagtgtaggccggataaggcgttcacgccgcatccggcagtcgtgctattatcaacgcatattcagtttattggcgtggtaggcaatatgctcgccaataaaactggagacaaaataatagctgtgatcataaccctcgtgataacggattaacgtcttgatattcatctcctggcagatcttttcaagatttggagtccgcagctgttctgcgtaaaaatcatcactcaacccctgatcaaccatgatttccgcaacgcgttgaccttgactaataagactcaccgggtcgtaatccaaccaggcatctttattttcagcaagatatgcagcaaaggcttgctgtccccacggcacttggcttggggagacaatggggctaaacgcgctgacgctgacatattcatctgggttacgtaacgccagcaccagcgcgcccagcccgcccatagaatgaccagagatagactttttggccgttgccggaaaatgatgcatcactaaatccggcagctcgttgcggatatagtcatacattttgtaatgttcattccacggcgcttgcgtcgcgttcaggtaaaacccggcaccttgcccgagatcgtaacggtcagcatctgcgacatgactgcctcgcggactggtgtccggcgcaacaacaataatgttgtgctcagccgcgtaacgctgcatcccgcttttagtaatgaaattctgctcgttgcaggtcaggccactaagccagtacagcaccggcaatttttcattcgcggcttttggtgggagatagacgccgacattcatttcacatttcagactttgggaataatgccgatacatattttgccagccgccaaagctgacatgtttttcaatgagttccatcagtcattatctcagggttaatcccccggacggctgcccggggagagtattaagaacccccgcctgaagtggacggggtaaacctgcgggaaatcagtaacgaattacggttcgaatggatttgccttcatgcatcaggtcgaaggcgtcattaatttcatccaggctcatggtatgcgtgacaaacggttccagatcgatatcacctttcatcgcatcttcaaccatgcccggtaactgggaacgacctttcacgccgccaaacgcggaacctttccatacgcgaccagtgaccaactggaatggacgggtggagatttcctgaccggcaaccgcgaccccgatgatcacgctctgaccccagccgcggtgcgcactttccagcgccgcacgcatcacgttgacgttaccgatgcattcaaaggtatggtcgataccccatttgttgatatccaacaggacatcttttatcggtttgtcgtagtcattcgggttaatgcagtcggtagcaccgaagcgacgcgccagatcgaatttcttcgggttggtatcgatagcgataatccgacccgctttcgcctgacgcgcgccctgaaccactgccagaccaatcgcgccaagaccaaacacggcaacagaatcacctggctggactttagctgtgttgtgtaccgcgccaataccggtggtcacgccacagcccagcaggcagacgtgttcatggtttgcttctggattaatttttgccagagacacttccgcgactacggtgtattcactgaatgtagagcaccccatgtagtgataaagcggctgcccgttgtaagaaaaacgggtggtgccgtctggcatcaggcctttaccctgggtttcgcgaaccgcaacacagaggttagttttgccagaacgacagaactcacactcgccgcactccgcggtgtaaagcgggatcacatggtcgccaggtttgacgctggttacgccttcaccgacttcaaccacaacgccggccccttcgtgaccgagaaccaccgggaatacaccttccgggtcatcgccggagagggtaaatgcgtcggtatggcaaacgccggtatgggtgactttaattagcacttcaccttttttcggtggtgcaacgtcaatttcaacgatttccagcggtttaccgggagcaaatgcaacggcagcacgacttttcatctctcgctcttcctcaatatggtaatagattcagttatttaagataggcacgaaccagttcaatagtgtcgtcaacggattggctgacttcgcggctgtagcagtcatttcggtcaaacgtttcccggatatggctttcaagcacttctgccatcagcccattagccgcgccccgaacggcagcgatctgttggagtatggcacggcattcggcatcaccctccaggctccgttccagagcatcaatctgcccccgaatacgacgaactcgagtaaggacctttttcttctcttccggagtactgggcatttcgcacctcatcatctgcatgcaatatactataggggggtattctatatgtcaatgcatacccccctatagtatataacactggagaataaaatttatccggtgaatgtggtcggaaaacaaagaggaaaggggggggggctaatcggcagggaaggccgccccggatagcgggcggcagaaggaatcagaatttccaggtcagacgggctgcaagttgcagaccgttacgagatggacggtcccctcgcccccttggggagagggttagggtgagggggcgttcaccgtactttcaacaggttaactccccctttctgagaggaaacaaaattaacgcagaatcttcttctcagccaaatccagcgcaaagtagctgaaaatcagatccgcacccgcacgcttaatgctacctaagctttcgagcacgactttctcttcatctatagcacccgccagcgcggcgaacttaatcatcgcatactcaccgctcacctgatacgcgccaatcggcaattcagtacgttcacgcagctcacgcacgatgtcgaggtacgctccagcaggtttaaccatcaggcagtctgcgccctgggcttcatccagcagactttcacgaatcgcctcacgacggttcattgggttcatctgatagcttttgcggtcgccttttaatgcgcttccggcagcttcacggaacgggccataaaaggaggaggcgaacttggtgctatagctcataatcgccgtatctttaaatcccgcagcgtccagcgcctgacgaatcgcctgtacctggccgtccatcgcggcggaaggggcgatgaagtctgcacctgcagcagctgcaaccacggcttgcttgcctaaattttccagagtcgcgtcgttgtcgacgccatgctcgcacagcacaccgcagtgaccgtgagaagtgtattcacagaagcaggtgtcactcataacgatcatttctggcacggtctgcttgcagatgcggctcatacgcgccaccagtccatcttcccgccaggcatcgctgccggtttcatcggtatggtgagagatgccaaaagtcatcacggaacgaataccggcgttggcgatgcgttcaatttcgcgtgccagatgtttctctggaatgcgcatcacgcctggcatggcttcaacggctttgtagtcgtcaatttcttcttcaacaaagatcggcaacaccaggtcgttaaggctaagtgttgtctcttcaaacatagcgcgcagcgcaggagatttgcgcaggcgacgagggcgttggattaagtctgtcatggtctgcctgatgtttgtggaatcgaggggcatagtatacctgaagcagggtagggatgttttacgaaagttgtcgcgatgttgacaagaagagaatggaagagaggccaggacatctttttaatagaaacagcaataattttatattcactgaaaatatttttaatcttgaatattatcgggcgttaaaatattacattgtggttttcaatgcgttatccgcagcgtgacgctccagcgccagttcaatcaaacgtgtgatcagatcggtgtaacccagaccgctggcttgccacagcttcggatacatactgatattagtgaagccaggcagggtgttgatctcgttgatcaccacttcgttctctggggttaaaaacacgtctacacgcgccatgcctgcgcatcccaacgtttgataagcctgaacggcaatcgcccggatcttatcgttgatttctggcgcaatggctgccggaactaccactttcgcgccatcttcgtcaatgtacttggtgtcgtaggcatagaaatcgctggtgagtacgatctctccacaggtgctggcttgcggattgtcgttgcccagaactgcgcattcgatctcacgacctttgatcccttgctcaacgatcactttatgatcgaactcgaacgccagatcgacggcaattgcgtactgttcttcactggttactttgctgacaccaacagaagagccctgattagccggttttacaaacagtggtaaccccagtttagactccacttcggcaaaactaatgttgtgacgattggcgcgcgtcagggtaataaatggcgcaatgttcagcccggcatcgcgtagcagacgtttggtgacatctttgtccatacaggctgcactagccagaacatcagaacctacaaacggtaaattggcgacccgcagcattccctgcaaggaaccatcttcgcccagcgtaccgtggacaatcgggaaaatgacatccaccgtcggcaacggctgaccgttttgcgcgtcgataagctgatgctcatgtttacctggcacctgcgcaaggctggtcgcgctagggcgcaacgcaatatgggcaggatcgtctgcatttagcagataattgctggcatcgctgacgtgccattgcccttgtttatcaatgcccagcagcacaacgtcgaagcgacttttatcaatggcatcgacaatgttttttgcgctttgcagagacacttcatgttccgcacttttaccaccaaaaacgattcctacccgcagtttttccatcttaaaaacctatcccgtctaacacaaagtgcatacattaccacgacaaaacgggggattcgcggccttctgaaagattgttgcaatcttctgctgacaaagcgtgcaacgtactggtgaagaaagtgcgttatctcaaagatgtgcgcaagatcacaaaaatgatgaacgggaagctaatttattcctggcttaaatggccatgcggtgagtttttttctcttaattataagttaacgaagagaatatatttcataacttttatttataataaaggttgataattaaaagcctatattttgtgtgggtaattatttaaataagagaaacgtttcgctggtaatcaaacaaaaaatatttgcgcaaagtatttcctttgtcataaaaataatacttccagacactatgaagttgtgaaacataatgttaacttctccatactttggataaggaaatacagacatgaaaaatctcattgctgagttgttatttaagcttgcccaaaaagaagaagagagcaaagaactgtgtgcgcaggtagaagctttggagattatcgtcactgcaatgcttcgcaatatggcgcaaaatgaccaacagcggttgattgatcaggtagagggggcgctgtacgaggtaaagcccgatgccagcattcctgacgacgatacggagctgctgcgcgattacgtaaagaagttattgaagcatcctcgtcagtaaaaagttaatcttttcaacagctgtcataaagttgtcacggccgagacttatagtcgctttgtttttattttttaatgtatttgtacatggagaaaataaagtgaaacaaagcactattgcactggcactcttaccgttactgtttacccctgtgacaaaagcccggacaccagaaatgcctgttctggaaaaccgggctgctcagggcgatattactgcacccggcggtgctcgccgtttaacgggtgatcagactgccgctctgcgtgattctcttagcgataaacctgcaaaaaatattattttgctgattggcgatgggatgggggacagcgaaattactgccgcacgtaattatgccgaaggtgcgggcggcttttttaaaggtatagatgccttaccgcttaccgggcaatacactcactatgcgctgaataaaaaaaccggcaaaccggactacgtcaccgacagcgctgcaagtgcaaccgcctggagtaccggtgtcaaaacctataacggcgcgctgggcgtcgatattcacgaaaaagatcacccaacgattctggaaatggcaaaagccgcaggtctggcgaccggtaacgtttctaccgcagagttgcaggatgccacgcccgctgcgctggtggcacatgtgaccagccgcaaatgctacggtccgagcgcgaccagtgaaaaatgtccgggtaacgctctggaaaaaggcggaaaaggaagcattaccgaacagctgcttaacgctcgtgccgacgttacgcttggcggcggcgcaaaaacctttgctgaaacggcaaccgctggtgaatggcagggaaaaacgctgcgtgaacaggcacaggcgcgtggttatcagttggtgagcgatgctgccagtctgaatagcgtgacggaagcgaatcagcaaaaacccctgcttggcctgtttgctgacggcaatatgccagtgcgctggctaggaccgaaagcaacgtaccatggcaatatcgataagcccgcagtcacctgtacgccaaatccgcaacgtaatgacagtgtaccaaccctggcgcagatgaccgacaaagccattgaattgttgagtaaaaatgagaaaggctttttcctgcaagttgaaggtgcgagtatcgataaacaggatcatgctgcgaatccttgtgggcaaattggcgagacggtcgatctcgatgaagccgtacaacgggcgctggaattcgctaaaaaggagggtaacacgctggtcatagtcaccgctgatcacgcccacgccagccagattgttgcgccggataccaaagctccgggcctcacccaggcgctaaataccaaagatggcgcagtgatggtgatgagttacgggaactccgaagaggatagtcaagaacataccggcagtcagttgcgtattgcggcgtatggcccgcatgccgccaatgttgttggactgaccgaccagaccgatctcttctacaccatgaaagccgctctggggctgaaataaaaccgcgcccggcagtgaattttcgctgccgggtggtttttttgctgttagcaaccagacttaatggcagatcacgggcgcatacgctcatggttaaaacatgaagagggatggtgctatgaaaataacattactggttaccttgcttttcggtctggtttttttaaccaccgtcggcgctgccgagagaactttaaccccacaacaacagcgtatgacctcctgtaatcagcaggcgacggcgcaggcgttgaaaggggatgctcgtaagacctacatgagtgattgcctgaagaacagcaagtctgcgcctggcgaaaaaagtttgacgccacagcagcaaaagatgcgcgaatgcaataatcaagcaacacaacaatctctgaaaggtgatgatcgtaataagtttatgagtgcctgcctcaagaaagccgcctgatacctgatagtgctaacgggtgagctacgaaaatggctcacccgaaatatcatacttctgcctttagctccgtctctataatttgggaaaattgtttctgaatgttcccaaaaataatgaatgatgaaaactttttcaaaaaagcggcggcgcacggggaggaacctcctttaactcctcaaaacgaacatcagcggtccgggctgcgcttcgcccgtcgcgtcagactaccccgtgcggttggcctggctggcatgttcttaccgattgctagtacgctggttagtcacccgccgccgggctggtggtggctggtgttggtcggctgggcgttcgtctggccgcatttagcctggcagatagcgagcagggccgtcgatccgcttagccgggaaatttacaacttaaaaaccgatgcagtattagcgggaatgtgggtaggcgtaatgggcgtaaacgtgctgccttccaccgcgatgttgatgattatgtgtctgaatttgatgggggcaggcggcccccgtctgtttgtcgcgggtctggtgttgatggtggtttcctgccttgtcaccctcgagctgacgggcattaccgtgagcttcaatagtgcgccgctggaatggtggctctcccttcccattattgtcatttatcctctgctgtttggctgggtcagctaccagacggcaaccaaactggcggaacataaacgcaggttgcaggtcatgagtacccgcgacggcatgacgggcgtgtataaccgacgtcattgggaaactatgttacgcaatgaatttgataactgtcggcggcataatcgcgatgcaacgttactgattatcgatatcgaccatttcaagagcatcaacgatacctggggccatgatgtgggcgatgaagcgattgtggcgcttacccgacagttacaaattgccctgcgcggtagcgatgtgattggtcggtttggcggcgatgagtttgcagtaatcatgtccggtacgccagctgagagcgccattaccgccatgttacgggtgcatgaagggctaaatacattacgtttgccgaatacgccacaggtaactttacggattagtgtgggggttgcgccgctgaacccacaaatgagtcactatcgtgagtggttgaaaagcgcagatttggcgctttacaaagcaaagaaagccggacgtaaccgcaccgaagtggcggcctgacgtccggcgaaagtcatcaggatttgctgagtttttcacttttttccatacacttcgtcatcgcttcgatcactgcagcacggaagcctttctcttccagtacgcgtaccgcttcaatggtggtgcctcccggactgcagaccatatctttcagtgcccccggatgttctcccgtttccagcaccatttttgcggaacccattaccgcctgagcggcaaatttatacgcctgggcgcgtggcatcccgcccagcacggcggcgtcggccatcgcttcgataaacataaatacgtaggctgggctagaaccgctcacaccgaccaccgggtggatcatcggctcagcaattacttccgcttcgccaaagcagcggaaaatattcagcacatcagcggtatcttctggggttaccagcgcgtttggcgttacggaggtcatcccggcattaaccagtgcgggagtgttcggcatggcgcggataattttccggtcatggcccagcgcgcgggcaagctggtcgagcgtgacacctgcagcaatagaaacgaccagagagtctttattcaggctggaggtgatttcgctaagcactttaatcatgatgccaggtttaacggcagcaaaaatgatgtcggcgatttgcgccacttcttgcgcgctttctgcggcgttgatgccgaactggtcatgcagggcggcgactttatccggggagggggtgtatacccagatttgccctggaagcacctgaccgctggcaatcagaccgccgagaatggcttttcccatattgccgcagccaataaaaccgattttcttttccattgcctcactcctgccgtgaaattcattgttttgataatcgctggcagaagcataaacagaactatgccggaaggcaaaagcgcgacacaatagaggattacccaacaaaggatgactttatgacaatttgggtggatgccgacgcgtgtcccaatgtaattaaagagattttgtatcgcgcggcggaacgtatgcagatgccgctggtactggtagcaaaccagagtttacgcgtgccgccaagccgatttattcgtacgctgcgcgtcgcggcaggtttcgacgttgccgataacgaaattgtccggcagtgtgaagcgggcgatttggtgatcaccgcagatatacctttggctgctgaagccatcgagaaaggcgctgcggcgcttaatccgcgcggcgaacgttacacgccagcgaccattcgtgagcgcctgacgatgcgcgattttatggataccttacgtgccagtgggatccagaccggcggaccagatagccttagtcaacgtgaccgccaggcctttgccgcggagctggagaagtggtggctggaagtgcaacgtagtcgtggctaaatgtaatttattatttacacttcattcttgaatatttattggtatagtaaggggtgtattgagattttcactttaagtggaattttttctttacaatcgaaattgtactagtttgatggtatgatcgctattctcatgacaccggctttcgccgcattgcgacctattggggaaaacccacgatgacacaacctctttttctgatcgggcctcggggctgtggtaaaacaacggtcggaatggcccttgccgatagccttaaccgtcggtttgtcgataccgatcagtggttgcaaagtcagctcaatatgacggtcgcggagatcgtcgaaagggaagagtgggcgggatttcgcgccagagaaacggcggcgctggaagcggtaactgcgccatccaccgttatcgctacaggcggcggcattattctgacggaatttaatcgtcacttcatgcaaaataacgggatcgtggtttatttgtgtgcgccagtaagtgtcctggttaaccgactgcaagctgcaccggaagaagatttacggccaaccttaacgggaaaaccgctgagcgaagaagttcaggaagtgctggaagaacgcgatgcgctatatcgcgaagttgcgcatattatcatcgacgcaacaaacgaacccagccaggtgatttctgaaattcgcagcgccctggcacagacgatcaattgttgattttcgagcgcctatacttaacgttcatcccgtgaaataaggaagaacgatgccaacgaaaccgccttatcctcgtgaagcatatatagtgacgattgaaaaaggaaagccaggacagacggtaacctggtaccaactcagagccgatcatcctaaaccagacagcttgatcagtgaacatccgaccgctcaggaagcgatggatgcgaaaaaacgctatgaggaccctgacaaagagtgaccgcatcagactgctcggaagggattctgagtgccactacaagggatctgcgtcacatttttcataattcatgtttttctaataattagaatattaaacaataacaatccattactggaatcatttggaatctttacattatgccgtgcacgtctgctgctacgctttttgtcatttgtagcacaagtaagtgtcagcagtggtgcttcacacttgcccggtaattaacgacgaaagaaaagtaaggtggatgaacaatgagtgcgagcttggcgatcctgaccatcggcattgtacctatgcaggaagttttgccgctcctgacggaatacattgacgaagataatatttcccatcatagcctgctggggaagttaagtcgtgaagaagtgatggcggagtacgcgccagaagcaggcgaagacaccattctcacattattaaatgacaaccagctggcccatgttagccgtcgcaaagtggagcgtgacctgcaaggtgtggttgaagtgctcgataatcagggttatgacgtcattttattaatgagtacagcaaacattagtagtatgactgcgcgtaatacgatctttcttgagccgagccgaatattgcctccactggtttcctctattgttgaagatcatcaggtgggggttatcgttccggttgaggagatgctgcccgttcaggcgcaaaaatggcaaattttgcagaaaagcccggtatttagtttgggtaaccccattcatgatagtgaacaaaaaatcattgatgccgggaaagaattactggcaaaaggggctgatgtcatcatgctggattgtttaggatttcaccaacgtcatcgcgatttactgcaaaaacagctcgatgttcctgtcttgctgtctaacgtattgattgcacggctggctgcggaattactggtgtaattttgcgtgacagccagcgcctctggcccctatagtgaagtagatgttcaactaccaaacagggccagtttatgcttcaaagtaatgagtacttttccggcaaagtgaaaagtatcggcttttccagcagcagcactggtcgcgccagcgtgggtgttatggttgaaggcgaatacaccttcagcaccgctgagccggaagagatgacggtaatcagtggcgcgctgaatgtgttactgcctgacgcgaccgactggcaggtgtatgaagccggtagcgtgtttaatgttcccggtcacagtgagtttcatctgcaagttgccgaacccacctcttatctgtgccgctatctgtaattcctcgccttccccttgaacgggagggcatttttctgaaatatcctttctttagcccataataatatttcctttgctgcgattttttcaatttccgatatattcataatttatcaaggttgatataaatatcagtgaagatctccagatattgttgcggaactggctacgataaaagataaatcagatgatgaatggtggcgtgcattgctgcaaagtcgcaatgatcatttacgccaaacggcattgcgcaacgcacataccccggcgttgttgttaacgacattgactgagcctcaggatcggagcctggctattaataatccacagctggctgccgatgtgaaaacggcgtggttaaaagaggatccaagtttactcttatttgtcgaacaacccgatcttagcctgttacgtgatttagtgaaaaccggggcaacgcggaaaattcgcagtgaagcgcgtcaccggcttgaggaaaaacaatgacacaacgtccatggagcaagttacagcgtaaaacgcataatattgctgcgctaaaaattattgctcgccgtagcgaataattatatgcctggtgtggcttcgtacgccggataagacgcggcaggcgtcgcatccggcattaaaggaaaatcagcaattaacgttgtgcttcgccacctaatccttcaatcaggttttgaattaacgctgccagttcaccagtcatcaggatgaaatcggcatcaaaacgctgggcgaaatcttcacggtcgatatcttcgttttgatcgcgcagctcgtcgcagaacttcagacgcttgaggctaccatcgtcgcacatcacaaactgaatgcgctgctgccagtcgagcgccagtttagtcaccacttttccggcttcaatgtgattggtgatctcttcgctggtcagatcttgtttcttcgcgcggatcacgccgccatcttccagcaagcttttcagctcggcttcatcaagcagctggaagccctgtgccgcactaccggagcgaacccattcggtcagcgtcagttcaatcgggttttccatgctcaatggtacaaccggtaagctccccaggcttttacgcagtaatgccagcgtatcttccgcttttttggcactggcgcagtccaccataatcaaaccgttaaccgtgtcgatccacatcattgtctggctaaaacggctgaaagcacgcggcagcagagagtgcagcacttcgtctttcaggctatctttttcggttttcttcagcttacgcgcctgttccgcttccagtttggcgattttcgcttccagcgcctgtttaatcaccggagacgggaggattttttcttctttgcgcgcgcagataacaatttgaccattggcaacgtgcgttaacgcatcgctgtggcttcccatcggaggaacccagcccatcttcgccatgtcctggctgccgcatggggtaaatgccatgctggctagctgtttttccatctcttctgcacgcaggctaatctcgcggctaagacggtaaaccattaaatttttgaaccacagcatgataatttccacggccttgtcgttaaatttagcgggcatgataacgaattgtcggcggccttgcattgccaatccggttgtccgtctctacgctattgatattgaaaaaaataaggagagtaccgtgcgtataggtatcgatttaggcggcaccaaaactgaagtgattgcactgggcgatgcaggggagcagttgtaccgccatcgtctgcccacgccgcgtgatgattaccggcagactattgaaacgatcgccacgttggttgatatggcggagcaggcgacggggcagcgcggaacggtaggtatgggcattcctggcagtattagcccttacaccggtgtggtgaagaatgccaatagtacctggctcaacggtcagccattcgataaagacttaagcgcgaggttgcagcgggaagtgcggctggcaaatgacgctaactgtctggcggttagtgaagcagtagatggcgcggcagcgggagcgcagacggtatttgccgtgattatcggcacgggatgcggcgcgggcgtggcattcaatgggcgggcgcatatcggcggcaatggcacggcaggtgagtggggacacaatccgctaccgtggatggacgaagacgaactgcgttatcgcgaggaagtcccttgttattgcggtaaacaaggttgtattgaaacctttattagcggcacgggattcgcgatggattatcgtcgtttgagcggacatgcgctgaaaggcagtgaaattatccgcctggttgaagaaagcgatccggtagcggaactggcattgcgtcgctacgagctgcggctggcaaaaagcctggcacatgtcgtgaatattctcgatccggatgtgattgtcctggggggcgggatgagcaatgtagaccgtttatatcaaacggttgggcagttgattaaacaatttgtcttcggcggcgaatgtgaaacgccggtgcgtaaggcgaagcacggtgattccagcggcgtacgcggcgctgcgtggttatggccacaagagtaaaaaacgtaggcaattggcgcatcatgcctgatgcgacgcttgccgcgtcttatcaggcctacaaaaggtgccagaaccgtaggccggataaggcgttcacgccgcatccggcaataagtgctccgatgcctgatgcgacgcttgccgcgtcttatcaggcctgcaaaatgtgccagaaccgcgtagggcggataaggcgttcacgccgcatccggcaataagtaatgagcaccgagactataacttaccccagtggtttcgccagcaccggagtatccgccgcttgctggcgcttatagcgaccatacagcagcaagctgctcatcgcagcaaagctaagcagggcggcaggcagcgccacgtaattatatgccagccccagcgtcagcatcatacctccgcaatatgcgccgacggcgctaccgaggttaaacgctatttgcccacctgcggcacctaataactctccgcctttggcgttttgtagtaacaatatttgtagcggtgcactaagggcaaataatcccgcgcaacaaataaaagcaaaaataaggctcgttgttttcatgccgccgcagaaaaagagcatcagcagtgccagtacaattataaagtcagttactgctgcaatgcgcagtggactataacgtccactaatcctgccacttagcatatttcccagcaccatccctagcccaactaacatcataataaaggtcatcgccgtttcgctaaaaccggaaataaacatcatgtatggctttacgtagctgaaccaggcaaacacacctgcgttgccaaacatcgtggcggcgaaaattaaccacggggccgggctgcgcaaaaagtgaaattgttcgcgcagatttcctttcgcctcgtcgcgaatatctggcacccaaaaatagacgcttgccatcaccgcaatattaaaaacagcgatcaataaaaaggtgtaacgccagctaaattcctgacttaaatacgttcccagcggaatgcccagcaaattggcgactgtcatcccggaaaccatccccgccacggcggcggtgacttttccgggtttgataattttacttaacacgatcgctccgacgccaaaaaatgcgccatgcggaaagccggataccagccgaccaatggcgagcatcaggtaagagctagagagcgtgaacatggcgttgccaatgacgcacaacgccaccagaaacaacaagatatgtttgagactgtagcggctggaaaagagtgcgatgattggcgcaccgaccaccacccccagtgcataatagctgatcatatgcccggcggcaggaatgctaattcctacgttatgcgccagctccgtgagcacgcccataatgccaaattcggccatccccaaaccaaacgtgcccagagccaaagataaaatgacttttttcataccaccatcacaaccaccagaacggctaccaatcaccgtagccaataaagtgatagcttgcaggataacgaccagcaaggccaagagataattcgcccctctgtattcattatcctgctgaatagttatttcactgcaaacgtactttccagtttgctgtagcccaggccgttgatctttttcactttgatctgcaccggaatacgctctttcatcgcttctacgtggctaatcacaccgatggttttgccactggcgttcagggcatccagcgcatcaagggcggtatccagcgtttcgctatccagcgtgccaaaaccttcatcaaggaacaggctgtcaatacgtgttttatggctgaccagatcgctaagcgccagcgccagcgccagactaacgaggaaactttcgccgccggaaagggtacgggtatcgcgtaccgcatctgcctgccaggtatcaacaacctcgacttccagcgcctcgctggctttgcgctgtaacagatagcgcccgtgcagccgggtaagttgctgattagcgagatggactaaattatccagcgtcagcccctgggcaaacttgcggaatttatcgccctctttggaacctattaggctattcagatatccccagtcctcaacctgctgcgtcatttgagcaatttgctgcattaaggtttgttgttgctgacggttatctgcatcctgcttcagctgctggcgaatctcgccttgactcgtggtgttttcacgcaacttttggtgagtttgcgctaactcttgctgaatctgctccaccgtcacagtgagagccaacccgtcgtcaggtcggtgttgttgatgctgtgccagcgtttctgctgtctgagtgaccagagtttgcgcctgacggcgctggttttccagattctgcttgagctgttccagctgcgttagtgtttgttcatccattagcgccgcaaggaacgcctgctgatcgtcaaagacgctggcctgtagcgcggtgtcaaactgcgcctgggctttttgcagactttgcgccgccagaacatcctgttgctgtaacgtctgctgctggctgtgtaatgcgagacattgttcatgtacctgccgccagttttccaataccacagtttcttcgcagtgcgggagttcatcactttgcggcaacgtttccagaatcggcgtcagctgctgaatacggttttgcagcgcggttaattcgttctggcgttgctgccagctctgcgcttcttgctgacgtgtcgccaaccagctctcttcttcatcttcctgtggcaatgtcagtgcataacccgtcaatgtcgttaaaagtagttgctggcgttgttcaatttgctgttgatactggataatttgctgattatgcgcggcaatctgcccttgtaattcatgccgttggctgagtaaccgcagctggcgttcgtgctcatcttgtgcatccagccacggttgaatatcgtccagtggctgcaaggtgatattgaggctggccgtgacggcttgccattgttgagtaagtgcttgctcatcttgtcggaggctttgcgcttcgttttcatcacgctgaagctgctttgttatggcgtccagttgcccacgtagcgtcgcaccttcttcaccgagctttttaacttcgttttccagcgccagtaatcgagactgattaacgccaggctccagcgcctgatacgcctcgaccgccgggtggctggtggaaccacaaagtgggcaaggctgacccgcctgtaactgtgcacgttgagcttccagcgttttgatgcgcgcttcctgctcgcaaatggttttcacatcggcaagttgctgcgtcttttctttataacgctggcgcatttcgttaagtgcggcgttacgttgcgtctgttcttgcgtgacattctggatagcgacctgtaactgcgccagacgtttttgttggggaacaatctgtccatgcagcgcgaccaggtgctgacgcagtgggcgttgctcagcatgttgcgccagggcggtagcaacttcatcggcggttaacgtcaacgtgatcgccgcaagcgcattaagtttttgctcagcatgggttaactgttgctgccattgccgcagatgctcgcgatcgctggtttgttgggagaactgcgcacgccaacccgccggttcgttgttccactgacggaagcggtcgtgttcctgtaaccaggtattcaggctttgttgctgctgctgtaattctgcactctgcttcgccgcgtggtggcgaatgctcgcgcgaagcgccattgtgctctgtaagcgagtatttacttcttcaatctgctggcgaatatgcgccagcgccgcgctgtgttctgcgatgcgttcccagtgtggacgaagatttcgtgccggttgtgccagactaagcgccgccagttgaggttgcgctttttcttcttcggctaacgcctgttgcaaggcctgctgacggcggctggcttcttgctgcaattcgtcctgacgcgttaaccagtttaggctttgttgttcttgctgctgcgcggtaattaactgtttttcttcgtcagtaagtacctgcaaactcgctgtcaggctttgcacttgttccggcgtgagcaacgtgacgccgctggcctgcgcttgcagcttctccagctctgtgcgggcgcttttgtgctgctcaaaaaccatcgcgctgatttgcccgtagatttcagtgccggttaactcctcgagcaattccgcgcgttctttgggtttggcattcaggaaggcagcaaattgcccctggctaagcagcatgctacgggtgaagcgcccgtaatccagcccggttaacgtcgctgtcagttccagcttatctttcactttgtcggcgagaattttgccgtcggcgcagcgcgccagctctacgcgtggcacctgcaaattaccgtcgggttggttacgcgcccgattctggctccagaatgcacggtacgcttcacctttcacttcaaactccacctccgccagacattcggcggtatcgcgggtcatgagatcattttggctttgactaacgttagagagacgcggagtttcgtgatacagcgccagacaaatggcgtccagcagggtggttttccccgcacctgttgggccggtaatagcaaacagcccgttgctggcgaacggctcgcgggtgaaatcaatcttccattcgccttttaaactgttcaggtttttcaggcgcaggctgagaattttcatgcttcgtgttctccggcgagggtatgcaacgtcgtggtgaaaagatgctgcagacgttgctgctggctttcatccagttcttccagtgccagacggcgattgaacacctcttcgacgctgagttcgctgagggtttcacgctgttggctggctaacacacgctcgcgctgttcacgactccgacgtaccagcaatacttcgacaggcaaactttcggttaatgcctggattttgcgctgaatatcatgcagatactcatcagtagtgatttcgatatccagccagacaggtggctcctggcttacatcgcgccactgttccagctgtgcggtaatgctcgccagatcgcctttcagcactgccatgggttgcgttaccggtacgttcaggttttccacgctctctaatttgccgttactaaatgtcaccagatggacatatttactcttaccgcattcatcaaaactcagtggaatgggggagccgcaatagcgaacatgttccatgccgccaataatctgtgcgcggtgaatatgcccgagcgcgatgtagtcggctggtggaaagttttgtgccggaaacgcgtccagcgtgccaatataaatgtcacgcacggcgtcacttttactggcccccacggtcgttaaatgtcccgtggcgatgatgggcagaggctgatcgccgcgcagtttgcaggcatcggcatagtgttgttggtaataatcggtaatcgctgccagtaaatgctgctgtttttcaataccgttaagccccgcctggctggtaataatgtcacgcggacgtaaaaacggaatggggcacagcactgcgcctggcgtcccgtcgcgacgaggcaagatttgcggcgcatgtccggcgctggcgaccacggtagtattgaggaacgccatgatatcgcggctttcattcagcgtggcgacgctgtcatggtttcctgccagtaccaccagatgacagccagtttgctgtaaattgacaacaaaacggttgtataacgtgcgggcgtaactgggcgggctgccggtatcgaaaacatcaccggcaacaataatcgcatccacctgatgggtttgtgctgtctccagcagccagtcaagaaaagcctgatgttcagcttcgcggcttttactgtagaagttctggccgagatgccagtcactggtgtgaaggatgcgcataacggttccctggcgaaaaagcatgggcgcgattatacccaaacagatgtgccatttgcttttttctgcgccacggaaatcaataacctgaagatatgtgcgacgagcttttcataaatctgtcataaatctgacgcataatgacgtcgcattaatgatcgcaacctatttattacaacagggcaaatcatggcgagacgtattctggtcgtagaagatgaagctccaattcgcgaaatggtctgcttcgtgctcgaacaaaatggctttcagccggtcgaagcggaagattatgacagtgctgtgaatcaactgaatgaaccctggccggatttaattctcctcgactggatgttacctggcggctccggtatccagttcatcaaacacctcaagcgcgagagcatgacccgggatattccagtggtgatgttgaccgccagaggggaagaagaagatcgcgtgcgcggccttgaaaccggcgcggatgactatatcaccaagccgtttagcccgaaggagctggtggcgcgaatcaaagcggtaatgcgccgtattagcccaatggcggtggaagaggtgattgagatgcagggattaagtctcgacccgacatctcaccgagtgatggcgggcgaagagccgctggagatggggccgacagaatttaaactgctgcacttttttatgacgcatcctgagcgcgtgtacagccgcgagcagctgttaaaccacgtctggggaactaacgtgtatgtggaagaccgcacggtcgatgtccacattcgtcgcctgcgtaaagcactggagcccggcgggcatgaccgcatggtgcagaccgtgcgcggtacaggatatcgttttagtacccgcttttaacgccttgctcatcggacgcagagcagggcttatgatttcttaactggagtatcttacgtgctggaacggctgagctggaaaaggctggtgctggagctgctactttgctgcctcccggctttcatcctgggtgcattttttggttacctgccctggtttttgctggcaagcgtaacaggactgcttatctggcatttctggaatttattgcgccttagttggtggctgtgggtggatcgcagtatgaccccgccaccggggcgtggtagctgggaaccgctactatacggcttacaccagatgcagctgcgaaataaaaaacgccgccgtgaactgggcaatctgattaaacgctttcgtagcggcgcggagagcctgcccgacgcggtggtgctgaccacggaagagggcggtattttctggtgtaacggtctggcgcaacaaattcttggtttgcgctggccggaagataacgggcagaacatccttaacctactgcgttacccggagtttacgcaatatctgaaaacgcgtgatttttctcgcccgctcaatctggtgctcaacaccgggcggcatctggaaattcgcgtcatgccttatacccacaaacagttgctgatggtggcgcgtgatgtcacgcaaatgcatcaactggaaggggcgcggcgtaacttttttgccaacgtgagccatgagttacgtacgccattgaccgtgttacagggttacctggagatgatgaatgagcagccgctggaaggcgcggtacgcgaaaaagcgttgcacaccatgcgcgagcagacccagcggatggaaggactggtgaagcaattgctgacgctgagcaaaatagaagccgcaccgacgcatttgctcaatgaaaaggttgatgtgccgatgatgctgcgcgttgttgagcgcgaggctcagactctgagtcagaaaaaacagacatttacctttgagatagataacggcctcaaggtgtctggcaacgaagatcagctacgcagtgcgattagcaacctggtctataacgccgtgaatcatacgccggaaggcacgcatatcaccgtacgctggcagcgagtgccgcacggtgccgaatttagcgttgaagataacggaccgggcattgcaccggagcatattccgcgcctgaccgagcgtttttatcgcgttgataaagcgcgttcccggcaaaccggcggtagcggattagggttagcgatcgtgaaacatgctgtgaatcatcacgaaagtcgcctgaatattgagagtacagtaggaaaaggaacacgtttcagttttgttatcccggaacgtttaattgccaaaaacagcgattaatccgcctttgtcatcttttattgccataagccagtcgatgctggcttattttctttgcagtcaaaatacgggcgttagattttacaacgattggtgattttttgttcgcatgattagccatgtctttttcacggaaatagtgttttatactggttggtgatttcttatcgctatatacctctggtttttagatccctccttgctttaaaacgttataagcgtttaaattgcgcttcaggtgctgtcatactgactgcattaacgcggtaaatcgaaaaactattcttcgccgcgcctggttgggagtatttcccgctaaaattgtttaaatataccgctgtatcatccccagggattggcacaaaaatttaacgttacaacaccacatccacaggcagtatgatttatgacccatcaattaagaagccgcgatatcatcgctctgggctttatgacatttgcgttgttcgtcggcgcaggtaacattattttccctccaatggtcggcttacaggcaggcgaacacgtctggactgcggcattcggcttcctcattactgccgttggcctgccggtattaacggtagtggcgctggcaaaagttggcggcggtgttgacagcctcagcacgccaatcggtaaagtcgctggcgtactgctggcaacggtttgttacctggcggtggggccgcttttcgctacgccgcgtacagctaccgtttcctttgaagtggggattgcgccgctgacgggtgattccgcgctgccgctgtttatctacagcctggtctatttcgctatcgttattctggttagcctctatccgggcaagctgctggataccgtgggcaacttccttgcgccgctgaaaattatcgcgctggtcatcctgtctgttgccgctattgtctggccggcgggttctatcagcacggcgactgaggcttatcaaaacgctgcgttttctaacggcttcgttaacggctatctgaccatggatacgctgggcgcaatggtgtttggtatcgttattgttaacgcggcgcgttctcgtggcgttaccgaagcgcgtctgctgacccgttataccgtctgggctggcctgatggcgggtgttggtctgactctgctgtacctggcgctgttccgtctggggagtgacagcgcgagcctggtcgatcagtctgcaaacggcgctgctattctgcatgcttacgttcagcacacctttggcggcggcggtagcttcctgctggcggcgttaatcttcatcgcctgcctggtaacggcagttggcctgacctgtgcttgtgcagaattctttgcccagtacgtaccgctctcttatcgtacgctggtgtttatcctcggcggcttcagcatggtggtttctaacctcggcttaagccagctgatccagatctccgtaccggtgctgaccgctatttatccgccgtgtatcgcactggttgtattaagttttacacgcagttggtggcataatagctcccgcgtgattgctccgccgatgtttatcagcctgctttttggtattctcgacgggatcaaagcatctgcattcagcgatatcttaccgtcctgggcgcagcgtttaccgctggccgaacaaggtctggcgtggttaatgccaacagtggtgatggtggttctggccattatctgggatcgcgcggcaggtcgtcaggtgacctccagcgctcactaaatcactgaacatttgttttaaccacggggctgcgatgccccgtggttttttattgtgttgatgggttaggaattgatggaaagtaagaacaagctaaagcgtgggctaagtacccgccacatacgctttatggcactgggtagtgcaattggcaccgggctgttttacggtagcgcagacgccatcaaaatggccggtccgagcgtgttgttggcctatattatcggtggtatcgcggcgtatatcattatgcgtgcgctgggggaaatgagcgtacataacccggccgccagctctttcagccgttatgcgcaggaaaacctcggcccgctggcaggttacattaccggctggacctactgctttgaaatccttattgtcgccatcgccgatgtgaccgcttttggtatctatatgggtgtctggttcccgacggtgccgcactggatttgggtactgagcgtggtgctgatcatttgcgccgtaaacctgatgagcgtgaaggtattcggtgagctggaattctggttcagcttctttaaagtcgccaccatcatcatcatgattgtcgccggtttcggcatcatcatctgggggattggcaacggcgggcaaccgaccggtattcataacctgtggagcaacggcggcttcttcagtaacggctggcttggcatggtaatgagcttgcaaatggtgatgtttgcttacggtgggatcgaaattatcgggattaccgccggtgaagcgaaagatcctgagaaaagcataccgcgtgcgattaactccgtgccgatgcgtattctggtgttctacgtcggtacgctgttcgtcattatgtctatctacccgtggaatcaggttggcactgccggtagcccgttcgtgctgacgttccagcatatgggcattacctttgccgccagcattcttaactttgttgtgctgactgctagcctgagcgcaattaacagtgatgtatttggcgtaggccgtatgctccacggtatggcagagcagggcagcgcgccgaaaattttcagcaaaacgagccgtcgcggtattccgtgggttacggtgctggtgatgactaccgcgctgctgtttgcggtgtatctgaactacatcatgccggaaaacgtcttcctggtgatcgctagcctggcaaccttcgccacggtgtgggtgtggattatgatcctgctgagccaaattgccttccgtcgccgtttgccgccagaagaagttaaggcgctgaaatttaaagtgccgggtggggtagcaacgaccatcggcgggctgattttcctgctctttattatcgggttgattggttatcacccggatacgcgtatcagcctgtatgtcggtttcgcgtggattgttgtgctgttgattggctggatgtttaaacgccgccacgatcgtcagctggctgaaaaccagtaatccttgcgttctgtaagccggttcaggaggaaatcctgatccggctattccgaaagttatccgcccccgtcctcctcccccaaatatccttcagatgatgagtgatcctgcattaggctatggcaaggtgatcagattttcatcacaggggaattatgatgttaaatgcatggcacctgccggtgcccccatttgttaaacaaagcaaagatcaactgctcattacactgtggctgacgggcgaagacccaccgcagcgcattatgctgcgtacagaacacgataacgaagaaatgagtgtaccgatgcataagcagcgcagtcagccgcagcctggcgtcaccgcatggcgtgcggcgattgatctctccagcggacaaccccggcggcgttacagtttcaaactgctgtggcacgatcgccagcgttggtttacaccgcagggcttcagccgaatgccgccggcacgactggagcagtttgccgtcgatgtaccggatatcggcccacaatgggctgcggatcagattttttatcagatcttccctgatcgttttgcgcgtagtcttcctcgtgaagctgaacaggatcatgtctattaccatcatgcagccggacaagagatcatcttgcgtgactgggatgaaccggtcacggcgcaggcgggcggaagtacgttctatggcggcgatctggacgggataagcgaaaaactgccgtatctgaaaaagcttggcgtgacagcgctgtatctcaatccggtgtttaaagctcccagcgtacataaatacgataccgaggattatcgccatgtcgatccgcagtttggcggtgatggggcgttgctgcgtttgcgacacaatacgcagcagctgggaatgcggctggtgctggacggcgtgtttaaccacagtggcgattcccatgcctggtttgacaggcataatcgtggcacgggtggtgcttgtcacaaccccgaaagcccctggcgcgactggtacagctttagtgatgatggcacggcgctcgactggcttggctatgccagcttgccgaagctggattatcagagcgaaagtctggtgaatgaaatttatcgcggggaagacagtattgtccgccactggctgaaagcgccgtggaatatggacggctggcggctggatgtggtgcatatgctgggggaggcgggtggggcgcgcaataatatgcagcacgttgccgggatcaccgaagcggcgaaagaaacccagccggaagcgtatattgtcggcgaacattttggcgatgcacggcaatggttacaggccgatgtggaagatgccgccatgaactatcgtggcttcacattcccgttgtggggatttcttgccaataccgatatctcttacgatccgcagcaaattgatgcccaaacctgtatggcctggatggataattaccgcgcagggctttctcatcaacaacaattacgtatgtttaatcagctcgacagccacgatactgcgcgatttaaaacgctgctcggtcgggatattgcgcgcctgccgctggcggtggtctggctgttcacctggcctggtgtaccgtgcatttattacggtgatgaagtaggactggatggcaaaaacgatccgttttgccgtaaaccgttcccctggcaggtggaaaagcaggatacggcgttattcgcgctgtaccagcgaatgattgcgctgcgtaagaaaagtcaggcgctacgtcatggcggctgtcaggtgctgtatgcggaagataacgtggtggtatttgtccgcgtgctgaatcagcaacgtgtactggtggcaatcaaccgtggcgaggcctgtgaagtggtgctacccgcgagtccgtttctcaatgccgtgcaatggcaatgcaaagaagggcatgggcaactgactgacgggattctggctttgcctgccattagcgctacggtatggatgaactaacgttttataacgccttgcgactcgcctgcgccatcatccgcggataaaactgccagaagcgggtttcgagggcgtcataatgagcgtctaaatcgtaccaggagtcacgcagggcatccagacgtgggcggcggcttgccatgccgtttaacacgttctggatgaaatccatatcgcgatagcgcaccagccactgctcactccacaagtaattgttcagattgataaaacgtggcggactgtccggcaaaatcgtcatcacttgctcgcgggcataacagacaaattcctgtagcggaaagtccgggctcagctggctccagtggcgggaaagaaagtgatcccacatgacatccagcgtaataggcgcaacgcggcgcgtttcactacgaaaccactcccgtgcttcgcggacttccggcagattgtcagtcaatacgtcgatacgtcgatgcatatgaatgccagccacgacgtcgggcggaaaactttcttcaggatttccgcgtacgaaatcagccagtaaattgccggaaaggctgctttccgcgagatgggctaaatgcaggtgagctaaaaaattcatcgattatattctatccaaaagggggtaaaggttgcagggagagcgccccggcactagactacccgcctcttattttagtctgagtcagtgtcatgcgcgttaccgatttctcctttgaattgcccgaatccctgattgcccactatcccatgcctgaacgcagtagctgtcgtttactgagcctggacgggccgacgggcgcgctgacgcacggtactttcaccgatttacttgataagctcaaccccggcgatcttctggtttttaataatacccgcgtgatcccggcgcgcctgtttgggcgtaaagccagcggcggcaagattgaagtgctggttgaacggatgctcgacgacaaacgcattcttgcgcatattcgcgccagcaaagcgccaaaacctggcgcagaactgctgctgggcgatgacgaaagtattaacgcaacaatgaccgcgcgccacggcgcactgtttgaagtcgaatttaatgatgaacgcagcgtgctggatattctcaacagcatcggccatatgccgctgccgccgtatatcgaccgtccggacgaagacgctgaccgcgaactttatcaaaccgtttatagcgaaaaaccgggcgcggttgcagccccgaccgcaggtctgcattttgacgagcctttgctggaaaaattgcgcgccaaaggcgtggagatggcgtttgtgacgttgcacgttggtgcgggcaccttccagccggtgcgcgtcgacaccattgaagatcacatcatgcacagcgaatacgctgaagtaccgcaggatgtggtagacgcggtactggcggcgaaagcgcgcggtaaccgggtgattgcggttggcaccactagtgtacgtagcctggaaagcgcggctcaggcagcgaaaaacgatctcattgaaccgttcttcgacgatacccaaatctttatctatccgggcttccagtacaaagtggtcgatgcgctggtgacgaacttccacttgccagagagcacgctgattatgctggttagcgcctttgccggttatcaacacaccatgaacgcctataaagcagcggtagaagagaaatatcgcttttttagttacggtgatgcgatgtttatcacgtacaatccgcaggcaattaatgagcgcgtcggggagtaattccgcggcgctggtttaaaacgttggactgtttttctgacgtagtggagaaaaaatgaaatttgaactggacaccaccgacggtcgcgcacgccgtggccgcctggtctttgatcgtggcgtagtggaaacgccttgttttatgcctgttggcacctacggcaccgtaaaagggatgacgccggaagaagttgaagccactggcgcgcaaattatcctcggcaacaccttccacctgtggctgcgcccgggccaggaaatcatgaaactgcacggcgatctgcacgattttatgcagtggaaggggccgatcctcaccgactccggcggcttccaggtcttcagccttggcgatattcgtaaaatcaccgaacagggcgtgcacttccgtaacccgatcaacggcgatccgattttcctcgatcctgaaaaaagtatggagattcagtacgatcttggtagcgatatcgtcatgatctttgatgagtgtacgccgtatcctgctgactgggattacgcaaaacgctccatggagatgtctctgcgttgggcgaagcgtagccgtgagcgttttgacagtctcggaaacaaaaatgcgctgtttggtatcatccagggcagcgtttacgaagatttacgtgatatttctgttaaaggtctggtagatatcggttttgatggctacgctgtcggcggtctggctgtgggtgagccgaaagcagatatgcaccgcattctggagcatgtatgcccgcaaattccggcagacaaaccgcgttacctgatgggcgttggtaaaccagaagacctggttgaaggcgtacgtcgtggtatcgatatgtttgactgcgtaatgccaacccgcaacgcccgaaatggtcatttgttcgtgaccgatggcgtggtgaaaatccgcaatgcgaagtataagagcgatactggcccactcgatcctgagtgtgattgctacacctgtcgcaattatagtcgcgcttacttgcatcatcttgaccgttgcaacgaaatattaggcgcgcgactcaacaccattcataaccttcgttactaccagcgtttgatggcgggtttacgcaaggctattgaagagggtaaattagagagcttcgtaactgatttttaccagcgtcaggggcgagaagtaccacctttgaacgttgattaatattaataatgagggaaatttaatgagcttttttatttctgatgcggtagcggcaacgggtgcaccggcgcaaggtagcccgatgtctttgattttgatgctggtggtattcggtctgattttctatttcatgatcctgcgtccacagcagaagcgcaccaaagaacacaaaaagctgatggactccattgccaaaggtgatgaagttctgacgaacggtggcctggttggtcgcgtaaccaaagtagcggaaaacggctacattgctatcgcgctgaatgacaccactgaagtagttattaaacgtgacttcgtagctgccgtcctgccgaaaggcaccatgaaggcgctgtaattaaaatttttccctaagggaattgccgtgttaaaccgttatcctttgtggaagtacgtcatgctgatcgtggtgattgtcatcggtctgctgtatgcgcttcccaacctgtttggtgaggatccggctgttcagatcactggtgcgcgcggagtcgccgccagtgagcaaacgctgatccaggtccagaaaacgttacaagaagaaaaaataactgctaagtctgtggcactggaagagggcgctattcttgcgcgcttcgactccactgacacccagttgcgcgctcgtgaagcattaatgggcgttatgggtgacaaatacgtcgtggcgcttaaccttgccccggcaacgccgcgctggctggcagctattcacgctgagccgatgaagctcggccttgacctgcgtggcggcgttcacttcctgatggaagtggatatggacaccgcgcttggcaaactccaggaacaaaatatcgatagcctacgcagtgacctgcgcgaaaagggcatcccgtataccactgttcgtaaagaaaacaactacggcctgagcatcactttccgcgatgctaaagctcgtgatgaagccattgcgtatctgagcaagcgccatccggacctggtgattagcagccagggcagcaaccagctgcgtgcggtaatgagcgatgctcgtctgagtgaagcgcgtgaatatgcggtgcagcagaacattaatatcctgcgtaaccgtgtaaaccaacttggcgtggcggagccggtggttcagcgtcagggtgctgaccgtatcgttgttgaactgccaggtattcaggacactgcgcgtgcgaaagagattctgggtgcgacggcaacgctggaattccgtctggtaaacaccaacgttgaccaggccgctgcggcatccggtcgcgtaccgggcgactctgaagtgaaacagacccgcgaaggtcagccagttgtgctgtacaaacgcgtaattctgaccggtgaccatatcaccgactccacttccagccaggacgaatacaaccaaccgcaggttaacatcagcctcgatagcgctggtggtaacatcatgtctaacttcactaaggacaacatcggcaaaccgatggcaaccctgtttgtggagtacaaagacagcggtaagaaagatgcaaatggtcgtgcggttctggtgaaacaggaagaggtgattaacatcgccaacatccagtctcgtctgggtaacagcttccgtatcaccggcatcaacaacccgaacgaagcccgtcagctgagtctgctgctgcgtgccggtgcgttgatcgcgccgattcagattgttgaagaacgtaccattggcccaaccctgggtatgcagaacattgaacaggggctggaggcttgccttgccggtctgctggtttctattctgttcatgatcatcttctataagaagtttggtctgattgcgaccagtgctctgattgccaacttgatcttaatcgtcggcattatgagcctgttgccaggcgcaacgctgagtatgccaggtatcgcgggtatcgtcttaacccttgcggtggcggtcgatgcgaacgtactgatcaacgaacgtattaaagaagagttgagcaacggacgtactgttcaacaggcaattgatgaaggttatcgtggcgcattcagttctatcttcgatgcgaacatcaccacgctgattaaagtcatcatcctgtacgcagtgggtaccggggcaattaaagggttcgcgattactaccggtatcggtgtggcgacgagcatgtttaccgcgattgtcggtacgcgtgccatcgtaaacctgctatatggcggcaagcgcgtcaagaagctgagtatctgaggagtgcgatgtggcacaggaatatactgttgaacaactaaaccacggccgtaaagtctatgactttatgcgctgggactactgggctttcggcatctctggtctgctgttaatcgctgctatcgttattatgggcgtgcgcggctttaactgggggctggatttcaccggtggtacggttattgaaattacgctcgaaaaaccggctgaaattgacgtaatgcgtgatgcattgcaaaaagccggttttgaagagccgatgctgcaaaactttggtagcagccatgacatcatggtccgtatgccgcctgctgaaggcgaaaccggcggtcaggtgttgggcagccaggttctgaaggtgattaacgaatccaccaatcagaatgcagcagtgaagcgtattgagttcgtcggtccgagcgtgggggcagaccttgcgcaaaccggtgcgatggcgttgatggcagcgctgctgtctatcctcgtgtacgtaggtttccgctttgagtggcgactggcggcaggggtggttattgcgctggcgcacgacgttatcattacgctgggtattttgagcttattccatatcgagattgacctgaccattgtggcaagcttgatgagcgttatcggttacagccttaacgacagtatcgtggtaagcgaccgtattcgtgaaaacttccgcaagatccgtcgcggtacgccttacgaaatctttaacgtgtccttgacccagacgctgcaccgtaccttgatcacatccggtactaccttgatggttatcctgatgctgtacctcttcggtggtccggtactggaaggcttcagcctgaccatgcttatcggtgtttccatcggtactgcatcttccatctatgtggcatctgcgttggctctgaaactgggtatgaagcgcgaacacatgttgcagcagaaagtggaaaaagaaggggcggatcagccgagtattctgccgtaatcaagttcccgttgatgttgaaaatcccggtcagaagatcgggattttttttgatgtatggagattgcgaaaatccccgcatcttgggaaactgcgcgtaaccctacatttcatccaggtaacttttcatggctatcatcccaaaaaactatgcgcggttagaaagcggctatcgcgaaaaagcattaaaaatctatccgtgggtctgcggtcgctgttcccgcgagtttgtttattccaacctgcgtgaacttaccgttcaccacattgatcacgaccataccaataacccggaagatggcagtaactgggaattgttgtgtctctattgccacgatcatgagcatagcaaatataccgaagcggatcagtatggtacgaccgttatcgcaggggaagatgcgcagaaagatgtcggtgaagcgaagtacaacccattcgctgacctgaaagcgatgatgaacaagaagaagtgattaaaacgtaaaattgcctgatgcgctacgcttatcaggcctacgttatttcagcaatatattgaatttacgtgcttttgttggccggacaaagcgtttacgccgcatccggcatgaacaaagcacacgttgttaacaatcagaaatgccgggaataaatcccggcattttcataatcagaagttgtaacctactaccaggtaaccaccccagccggtagagcgaacgttgaagttgccgttgccgaagttcagttctgcatcgtcgttccactgaccaccgtcgtgccagtaacgagctacgacagagtagtgccagtgatcgtagttcagagccagaatatggctggaagcgatagagttattagtacgggtcttaataccgttgattgcgttaccgctgtcatcccctaaatcggaaccccagtcgaagttggtgaagccgatgtagctcagctgaccgccccacagatcggtaatcggcacaaagtatttaattttgaaacggtaaccgtcccactcgttttcgttcgctgcgccatagttctgccactggtatttcgcatagacgttcatggacaggctcatcggcaggccagtgtcgatatcggtacccagacccatgtaccaggtgctctggcgaccatctttattacgacccatgtcgtaaatgtagttgttcgcgaagtaccactctttgaacggaccgaagctaaggtcagtattggtcagcttgtcgatggagaaacgtggttcgatttccataaacagcggagaaccgtggttccagatacctttagcatcggagttaccgccgaagaataccggcgcatccgcataaccatagaagtcgaaccagtcttttttagcgaatgcttcgtactcaaggtaggtatcgttgcggatctgcggtccgaaacgggtgtgatagcttccgacaacgttaacgctctggtgccaccagtcggaaagatactgcggtttgtcgttttcagctgcgttgacagtaaaagagctagagagcgccagtaccgcaccggctgccagtaatgtttttttcatatgtatgccactgtttgaaaatcccttgcgggagtgaaaaaggcgcaaattgcgtttctaaatatttcgtatacagaggagcctattataaaaatcattgctcacaaaaatatgtttcgtttcacagttctatcatttacgtaatcgattgcgttcacgtttacacacattcgggcggggattgtactgactttcgcccttgttgcaaacttttactatcaatccaggtgatgtaagcagagtaacaaaatgacggggaaagatgttgcgggacgcacaaaatcgtcccgaaatacgtttactgcataacaggttgaatgtcgtggatacgtacaaagcctaactgatccacagaaatcccctttaactgtaacggaatatcaacatcgctgggggcgaggacgctggcaggggcattaatcaattgattctgcacattgatttcctgaaagttgtctattgttccctgaatttgcccatattcaacagttccgctgaatgcgggcaagggatcattgctctcaccctgaatacgtagtgtaagggtggtgccatctgcatcaggcgtaatattcaccaggctcatacgtaaagtaccgatctggctttccagtcttgccggtgttttcgctccaggcagaaggtaaaccccactgctggattttgcattcagcctgttttgctgagtgattttgactgtttcttgattgagttgcgtcatctcctggttcagcgtgctgacgctgtgtttcatctgtcgcacttcactttgctgcacacaggcgctaaggctgaacaggcttcccagcaggagcagtcgaaaaacgttagtattcataggtcgtccctttctcgtcgcaattagcctaatggtagagggtaaaagcagcgaaagcatcgatcctttatctcaaaagcgttgcgcctttgttgtatcgtcagttcagggtaaaatagatttccgttaaccacctggtcaggacgccgtatgcattgcccattctgtttcgccgtggacactaaggtaattgactctcgtctcgtgggcgagggtagttccgtacgccgccgtcggcagtgtctggtgtgtaatgaacgtttcaccacctttgaagtggcggagctggttatgccgcgtgttgtaaaaagcaacgacgtgcgtgaaccgtttaatgaagagaaattgcgtagcggaatgctgcgggcgctggaaaaacgtccggtgagttccgatgacgtcgaaatggcaatcaatcatattaaaagccagctgcgcgccaccggtgagcgcgaagtgccgagcaagatgattggcaatctggtgatggagcaattgaaaaagctcgataaagtcgcctatatccgttttgcctctgtctaccgcagtttcgaagatatcaaagaatttggcgaagagatcgcgcgcctggaggactaagccgtgcaggacgagtattacatggcgcgggcgctaaagctggcgcaacgaggacgttttaccacgcatcccaacccgaatgtcgggtgcgtcattgtcaaagatggcgaaattgtcggtgaaggttaccaccaacgtgcgggtgaaccacatgccgaagtacacgcgttgcgtatggcgggtgaaaaagccaaaggtgcgaccgcctatgtcacactcgaaccctgtagccatcatggtcgtacgccaccgtgctgtgacgcactcatcgccgctggcgtagcgcgcgtggttgccagcatgcaagatcctaacccgcaggtcgctgggcgtggactttaccgtctgcaacaggctggcattgacgtcagccacggcctgatgatgagtgaagccgagcaattgaataaaggctttctcaagcggatgcgcaccggctttccttatattcagttaaaacttggcgcaagccttgatggtcgcacggcgatggcgagcggcgaaagccagtggatcactagcccccaggcgcggcgtgatgtacaactactgcgcgcgcaaagtcatgccattttaaccagcagcgccacggtgctggcggatgatcctgccttaacggtgcgttggtctgaactggatgaacaaactcaggcgctctatccgcaacaaaatctccgtcagccgatacgtattgtgattgatagccaaaatcgcgtgacgccggtacatcgcattgtgcagcagcccggcgaaacctggttcgcgcgtacgcaggaagattctcgtgagtggccggaaacggtgcgtaccttgctgattccagagcataaaggtcatctggatctggttgtactgatgatgcaactgggtaaacagcaaattaacagcatctgggtggaagcggggccaacgctcgctggcgcattgctgcaggcgggtttagtcgatgagctgattgtctatatcgcacctaaactattaggcagcgacgcccgcggattatgcacgctgccagggcttgagaaattagccgacgccccccaatttaaattcaaagagatacgtcatgtaggcccggatgtttgcctgcatttagtgggtgcatgatctcccggctcgaaagggaagcagcgcacgaaatattatgctaaaatccgcccccctgcggggccatactcgaacccgaaggaagaaaatgaacattattgaagctaacgttgctaccccggacgctcgcgtcgccatcaccatcgcgcgtttcaacaactttatcaatgacagcctgctggaaggtgcaattgacgcactgaaacgtatcggtcaggtaaaagatgaaaacattaccgttgtttgggtgcctggtgcctatgagctgccgctggcggcgggtgcactggctaaaaccggtaaatacgacgcggtgattgcgctgggtacggttattcgtggtggcactgcccactttgaatatgtcgctggtggtgcaagcaacggcctggcgcatgttgcccaggacagcgaaattccggttgcttttggggttctgaccactgaaagcattgaacaagcgatcgaacgtgctggcaccaaagctggcaacaaaggtgcagaagctgcactgaccgcgcttgaaatgattaatgtattgaaagccatcaaggcctgaaattagtaaggggaaatccgtgaaacctgctgctcgtcgccgcgctcgtgagtgtgccgtccaggcgctctactcctggcagttgtcccagaacgacatcgctgatgttgaataccagttcctggctgaacaggatgtaaaagacgttgacgtcctgtacttccgtgagctgctggccggggtggcgactaataccgcatacctcgacggactgatgaagccatacctgtcccgcctgctggaagaactgggacaggtagaaaaagcagtactgcgcattgcgctgtacgaactgtctaaacgtagcgatgtgccatacaaagtggccattaacgaagcgatcgaactggcgaaaagcttcggcgcagaagacagccataagttcgtcaacggcgtactcgataaagcagcacctgtgattcgccctaacaaaaagtgatatccaggccggtagattcacggaagaccgttccatgatcgccggccttttcttttttacctgctgaggcataacgtatggcatgtggcgagttctccctgattgcccgttattttgaccgtgtaagaagttctcgtcttgatgtcgaactgggcatcggcgacgattgcgcacttctcaatatccccgagaaacagaccctggcgatcagcactgatacgctggtggcgggtaaccatttcctccctgatatcgatcctgctgatctggcttataaagcactggcggtgaacctaagcgatctggcagcgatgggggccgatccggcctggctgacgctggcattaaccttaccggacgtagacgaagcgtggcttgagtccttcagcgacagtttgtttgatcttctcaattattacgatatgcaactcattggcggcgataccacgcgtgggccattaagtatgacgttgggtatccacggctttgttccgatgggacgagccttaacgcgctctggggcgaaaccgggtgactggatctatgtgaccggtacaccgggcgatagcgccgccgggctggcgattttgcaaaaccgtttgcaggttgccgatgctaaagatgcggactacttgatcaaacgtcatctccgtccaagcccgcgtattttacaggggcaggcactgcgcgatctggcaaatagtgccatcgatctctctgacggtttgatttccgatctcgggcatatcgtgaaagccagcgactgcggcgcacgtattgacctggcattgctgccgttttctgatgcgctttctcgccatgttgaaccggaacaggcgctgcgctgggcgctctctggcggtgaagattacgagttgtgtttcactgtgccggaactgaaccgtggcgcgctggatgtggctctcggacacctgggcgtaccgtttacctgtatcgggcaaatgaccgccgatatcgaagggctttgttttattcgtgacggcgaacctgttacattagactggaaaggatatgaccattttgccacgccataaagatgtcgcgaaaagtcgcctgaagatgagtaatccgtggcatctacttgctgtcggattcggaagtggattaagcccgatcgttcctgggacgatgggcagcctggcagcgattccgttctggtatctgatgacctttttgccctggcagctctacagcctggtggtgatgctggggatctgtatcggcgtctatctttgtcatcaaacggcgaaagacatgggtgtgcacgatcatggcagcattgtctgggacgaatttattggtatgtggatcacgctcatggcgctgccgaccaatgactggcagtgggttgccgccgggtttgtgattttccgtattctggatatgtggaagccgtggccgatccgctggtttgatcgcaatgtgcatggcggcatggggatcatgatcgacgatattgtcgccggggtgatttccgcaggcatcctgtattttatcggtcatcactggccgctgggtattctgagctaattgtgcaccgatgcctgatgtgacgcttgtcacgtctcatcaggcctggactcttatttaaatcctacgacaggatgcggtttatacggcgtttccagttcggcaatctgttccggcttcaaagtgatatccaccgcgttcaatagctcatcaagctgttcttcgcggctagttccgataatcggtgcggcaatgcccggtttactcaacaaccaggccagcgcaacttgtgctcgtgtcgcccccagttcttcactgacgcctgttaaccgctctgcgatctgcgcgtcattttcatcgctttctttatagagatttttccccacctcatcagacaccagtcgtgcggtagtttctccccacggacgcgtcagacggccccttgccagcgggctccatggaattaccgccacgccctcctgataacacagtggtagcatctcgcgctcttcttcacgataaatcagattgtagtgatcctgcatactgacaaactgcgcccagccgtgctgtttttggagttccagtgcctgagcaaactggctagcgtgcatactactcgcgccgatataacgcgctttcccggcttttaccacgtcgttgagggcttccagcgtctcttcgatcggcgtgttgtaatcccagcgatgaatttgcaggatatcgacataatccatgccgagacgtcgcaggctgtcgtcgatagagcgcaaaatttgcgcacgggataatccttccggtaaatcaccaacgcgatggaacactttggtcgcaacgaccacgtcttcacgacgggcgaaatcccgcagtgcgcgaccgacgatctcttcgctgctgccgtcagaataactgttggcggtatcaaagaaatttatgccgccttccagtgcacgtttaattatgggacggctgctttcttccggcagtgtccatgcgtgattaccgcgatctggctcgccaaaggtcatacagccgaggcaaagtcgggaaacgcgaaggtcggtttttcctaaggggttgtattgcatgctgccactcctgctatactcgtcatacttcaagttgcatgtgctgcggctgcattcgttcaccccagtcacttacttatgtaagctcctggggcttcactcgtttgccgccttcctgcaactcgaattatttagagtctatgaataatttcttaagcatagcaggagtggagtagggattatgccagccaggccttgattttggcttccataccagcggcatcgaggccgagttcggcgcgcatttcttcctgagttccttgcggaataaagaagtccggcaggccaatgttcagcacgggtactggtttacgatgggccatcagcacttcgttcacgccgctgcctgcgccgcccataatggcgttttcttctacggtgaccagcgcttcatggctggcggccatttccagaattaacgcttcatcaagcggtttcacaaaacgcatatcgaccagcgtggcgttcaggctttcggcgactttcgccgcttctggcatcagcgtaccaaagttaaggatcgccagtttctcgccacgacgcttcacaatgcctttgccaattggtagtttttccagcggcgtcagttccacgccgaccgcgttgccacgcgggtagcgcaccgcactcgggccatcgttatagtgatagccggtatagagcatctggcgacattcgttttcatcgctcggggtcataatgaccatttccggtatgcagcgcaggtaagagagatcaaaagcaccctgatgggtttgaccgtcagcaccaacaatgcccgcgcggtcgatggcgaacaggaccggaagcttttgaatcgccacgtcatgcagcacctgatcataggcgcgttgcaggaaagtggagtaaatcgcgacaatgggtttgtacccaccaatcgccagacccgcagcaaaggtcaccgcgtgttgctcggcaattgccacgtcgaagtagcgatccgggaatttacgactaaactcgaccatgccggaaccttcacgcatcgccggagtaatcgccatcagcttgttgtctttcgctgccgtttcgcacaaccagtcgccaaagattttactatagctcggcaaaccgccgctacttttcggcaaacaaccgctggagggatcaaatttaggcacggcgtggaaagtgatcgggtctttttctgccggttcataaccacgaccttttttggtcatgatatgcaggaactgcgggcctttcaggtcgcgcatgttctttagcgtggtgataagccccagcacatcgtgaccgtccaccgggccgatgtagttaaagcccagctcttcaaacaacgtgccaggcactaccatgcctttaatatgttcttcggtgcgtttgagcagctctttaattggcggcacgccagagaaaacttttttcccgccttcgcgcagactagagtaaagcttaccggaaagcagctgtgccagatggttgttgagcgcgccgacattttcggaaatgctcatttcattgtcgttgagaatcaccagcatatcaggacggatatcgcccgcgtgattcatcgcttcaaacgccatgcctgcggtaatcgcgccatcgccaatgacacagacggtgcggcgatttttgccttctttttcggcagcaaccgcaataccaattccggcactgatggaggtactactatgcccgacgcttaatacgtcatattcgctttcgccgcgccacgggaacgggtgcagaccgcctttctgacggatggtgccgattttgtcgcggcgtccggtcaaaattttatgcggataagcctgatgccccacatcccaaatcaattggtcaaacggggtgttgtagacatagtgcagcgccacggtcagttcgaccgtgcccagcccggaggcgaagtgcccgctggaacggctcacgctgtcgagtaaatagcggcgcagttcgtcgcagagtttcggtaaactctctttcggcaacagtcgtaactcctgggtggagtcgaccagtgccagggtcgggtatttggcaatatcaaaactcatcaggggcctattaatacttattgtttatttattacgctggatgatgtagtccgctagcgcttccagtgcgctggtatcgagactctgttcagccagttgtttcaggctctgacgggcatcgtcgatcagatcccgggctttcttccgggcttgctcaagacccagaagtgcagggtaggtacttttaccaagttgctggtcggcaccctggcgttttcccaacgttgcagtatctcccaccacatccaggatgtcatcctgaacctggaaggcaaggccgatgctctctgcatacttgtcgagtaccggcagagcacgacgtcctttatctccggcgcttaatgcaccaaggcgaacggcggcgcgaatcaatgcgccggttttatgacgatgaatacgctcaagcgcgtccagaggtacgtgtttgccttccgcgtctaaatctaatgcctgaccaccgcacattccggcaataccactggcgctcgccagttcagaaatcatgctaattctgtcgcggtcgctcacttccggcatatcggcatcgcttaaaatgctgaacgccagcgtttgtaaagcgtcgccagcgagaatcgcgtttgcttcgccaaacttcacatggcaggttggcaaaccgcgacgcagatcgtcatcatccattgccggtaaatcatcatgaattaaactgtaagcgtggatacactcaacggcggcagcgggtgcgtccagcgtgtttgtgctaacgccgaacatatgaccggtggcataaaccaggaaaggtcgcaggcgcttaccacctaataatgcgccatactgcatggtttcgaccacgggagtgttctgaaagggcagtggggcgataaaacggctcagcgcctggttggcctgcttaacgcaggcttcgagttgctgcggaaagtccattactcattgtccggtgtaaaaggggttagagaggcgtcttcattgtcagacagcagaatttgtacgcgctgttcggcttgttgtaatttggcctgcccctgacgtgccagctgcacgccgcgttcgaactcgttcagcgcctcttccagcggcaggtcgccactttccagacgggttacaatctgttccagctcgctcagcgccttttcaaagctggcgggcgcctcatttttcttcggcataatgaatgtctgactctcaatatttttcgccccgtcatggtaacggactcagggcaaatagcaaataacgcgcaatggtaaggtgatgtgcacagcaaagcgatgttagtggtatacttccgcgcctggatgcagccgcaggtgtgggctgctgtatttttccctatacaagtcgcttaaggcttgccaacgaaccattgccgccatgaagtttatcattaaattgttcccggaaatcaccatcaaaagccaatctgtgcgcttgcgctttataaaaatccttaccgggaacattcgtaacgttttaaagcactatgatgagacgctcgctgtcgtccgccactgggataacatcgaagttcgcgcaaaagatgaaaaccagcgtctggctattcgcgacgctctgacccgtattccgggtatccaccatattctcgaagtcgaagacgtgccgtttaccgacatgcacgatattttcgagaaagcgttggttcagtatcgcgatcagctggaaggcaaaaccttctgcgtacgcgtgaagcgccgtggcaaacatgattttagcagcattgatgtggaacgttacgtcggcggcggtttaaatcagcatattgaatccgcgcgcgtgaagctgaccaatccggatgtgactgtccatctggaagtggaagacgatcgtctcctgctgattaaaggccgctacgaaggtattggcggtttcccgatcggcacccaggaagatgtgctgagcctcatttccggtggtttcgactccggtgtttccagttatatgttgatgcgtcgcggctgccgcgtgcattactgcttctttaacctcggcggcgcggcgcatgaaattggcgtgcgtcaggtggcgcattatctgtggaaccgctttggcagctcccaccgcgtgcgttttgtcgctattaatttcgaaccggtcgtcggggaaattctcgagaaaatcgacgacggtcagatgggcgttatcctcaaacgtatgatggtgcgtgccgcatctaaagtggctgaacgttacggcgtacaggcgctggtcaccggcgaagcgctcggccaggtgtccagccagacgctgaccaacctgcgcctgattgataacgtctccgacacgctgatcctgcgtccgctgatctcttacgacaaagagcacatcatcaacctggcccgccagattggcaccgaagactttgctcgcacgatgccggaatattgtggtgtgatctccaaaagcccgacggtgaaagcagttaaaagcaagattgaagcggaagaagagaagttcgacttcagcattctcgataaagtggttgaggaagcgaataacgttgatatccgcgaaatcgcccagcagaccgagcaggaagtggtggaagtggaaaccgtcaatggcttcggcccgaacgacgtgatcctcgatatccgttctatcgatgaacaggaagataagccactgaaagtcgaagggattgatgtggtttctctgccgttctataaactgagcaccaaatttggcgatctcgaccagaacaaaacctggctgctgtggtgtgagcgcggggtgatgagccgtctgcaggcgctctatctgcgcgagcagggctttaacaatgtgaaggtatatcgcccgtaatttgtggtttttacgtcgcatctggtcagatgcgacgtttgccgcatccgacattactcgtaataattataaatccctgccgccatcaccagttgacttgccacttcatgggctttttcacgcccaaccaacaggtcgataattttcagaccaaagtcgatagctgtacccggcccctggctggtcagcaattttacccgtgcatcccagacgacgcgcttgtccagccattgttcggcgggaattttgtctttcagcgtcgggaagccggtcatattaccaatcgggaagatatcgtgcggcaccagcacggtggctggcgcggcgcaaatagccgcgacgatacgcccggaacggtggaactgtttaacggtttcaaccagcagagtgctatcgcgaaaacactccgcgcctttaatgccaccaggcagcacgatcacgtcatattcgccatcagccacttcgaccagcggcgcatccgccagcagcttcacgccgcggctgcaggtaatcgccaggttaccatcgctggcgacgctggcagtggtgactttgataccgccgcgaaccagcagatcgatagtggtgacggcttcagtctcttcactaccaggggcgaggcaaaccagtgcgcttgcgctcatattcactctcctttctttttttaattaccaggggcgaggcaaaccagtgccgatgcgctcatattcactctcctttctttttaccatttcaaacaggcgggtgttttccggtacggcaatcccatgcgcgcgggcgcggcgtaagagaaaaccattgatatagtcgatttcagtgtggcgcagcgcgcggatatcctgcaacatgctgctgatattttccgctgtggcatcaatcacctgcatcacgtaatcacgcaaatcttctgcactagtatgatgcccttcgcgttcgatcaccgccgcgacttcttcgcatatctgcataatttcttgcggatgatgacgtaattcaccgttcgggcaattccagatggcagtcagtggattaatcacgcagttgactgccagcttgcgccacagctcggcgcgaatattgttatgccaggcaacgtcaggcaacacggtttgcaaaatatccgccagataactgtaatccccgtcctgttgccgtgccgggccaatatgcgtgataccgtttgccacatgaataatgacattgccgtcgcggcgggctgcatgggtggtggtgcccatcagtaatggctgctgaatgttttgcaactcttcgatggtgcccatgccgttgtgaattaacagtattggcgtagttacaggcagtgtggacgcgaggcttttgacggcatcggaaacctgccatgctttcagcgtcaccaggagcagatcgctggtggcgagaaaatcgggatcgttggcggtcaggctttcgttaaatatgctaccatctgtctcaaccagattcacgctacaataaggttgcggtacgcgcagccagccctgaacttcatgaccctgtttgcaaagtgctgtaagccataattgccctaaggcaccgcatcccaatacggtaattttcattgttcctcctcacccgcaaccactccgggtgttcaataaggctatcccttaattgtgcatgctgttgcgactatgcacaattaagggatacgtcctggtgcaggactgtcggttatttaactttgcgggtattatgcttcgcatcaaaaatgaagggagaggaaaagatgccatctttcgatattgtctctgaagttgatcttcaggaagcacgtaacgcggtcgataacgcgagccgcgaagtggagtcccgttttgacttccgtaacgttgaagccagttttgagctgaacgacgccagcaaaaccatcaaagtgttgagcgagtccgatttccaggtcaatcagttgctggatattctgcgtgccaagctgctgaagcgcggcattgaaggcagtagcctggatgtaccggagaatatcgttcatagcggtaaaacctggtttgtggaagcgaaactgaaacagggcattgagagcgcgacccagaagaaaatcgtcaagatgatcaaagacagcaaactgaaagtgcaggcgcaaattcagggcgatgaaatccgcgtaacgggcaaatctcgtgatgatttgcaggctgtcatggcgatggtacgtggtggcgatctcggtcagccgttccagttcaaaaacttccgcgattaatcgcgactatgtgcgttttgttcatgtcagatgcggcatgaacgcctgattcggcctacaaaggtttgtaattcagaaactttgtaggcctgataagcgtagcgcagcaggcaattcgccgcgttttttatgcctgacgaattgcctgttctatctcaaagcgattcgtcactttgctgtcgattttcacataagcactatgttcttcttctgcaatcaacacttctttgatgccttcagtttctagcaaacgcacttttaacgcctcgtttgcggcaatgttcgccgggatttcaatgcgcaaactgctgacatacggcggttctttcatggtactggcgactgtcagccacactgcggccagcattgcgccagcgagaaataccccctgaccgtcaaacatgccgttaatccagccgcccaggctaccgccaatcgccacgccaagaaactggctggtggagtaaacacccatcgccgtacctttgtaacctgctgggctctctttactgataagactgggcaggagggcttccatcaaattaaacgccacaaagaaaagctgcacgccgaccaccagttgccagaactgcgtttgcgcgttccacaacacaatttccgcaaccacgatcaacccgacgcagaagacaaagacttgcttcattttgcgcttaacttcagcgtagataatgaaaggcacgacgctgccaaaggcgattagcattgtcgccagatagaccttccagtgttcagccgccgggaaccctgcatcagccagttgtccgggcagggcaacaaacgtgctcatcagcaaaatatgcagacacataatgccaaagttgagtttcagcagccgcggttccgccagcactttactgaaactgcctttcaccattccggactcacgattaagtacgtgagtgctactgttgggcacaacccaaatggtcaacgcaatgccggtcgttgccagaatagcgatcatccagaacagcgcgtgcagcccaagtttgtgagtgatgatcgggccaagcaccatcgcaatggcaaaggtaatgccaaagctcacgccgataaacgccatcgctttggtgcggttttgttcgcgcgtgagatcggaaagcagcgccataacggcggcggcaattgctccagagccttgtagcgcccggcccagaataattccccagatggagtcggaaagcgcagcgataacgctaccggcggcaaacaccgccagcccaccgacaattaatggtttgcgaccaatgcggtcggaaagcaggccaaacggaatctgaaaaacggcctgagtcagaccataaataccaatggcaataccgattaatgcttcgctggcaccttgcagagccatgccgtacgtggtcagaaccggcagaaccataaacatgcccagcatgcgcaagctgaatacggtccctaaaccccaggtcgcgcgcctctcacctggcgtcattttataatcgttcattaccacctctgttttaaattcgcgactagtgtaaagcggcaaacgaatggggtaaacatgcggattttttagtaaatatttcgagagggatatgtttctaatgctaagaaaaaaggtgccgtagcacctttttaatagagaggttttgttaccacacagcagccagcagcgtatggctgtccggtaccataaaatcaacggacatcatcacgctgagggcagtgatggcgatgatagagaagccgaacagcttgcgcgcccagattctgtcatcagcaactttataaccgcgcagagccatacctaaccaccagacgctaaccgccgcggcgaccaccagatatttatacccagcgtaaccgccaagagagagcatcagcgtggcaacggcaaaggcgatgatatacagcgtgatgtgattcttcgccacgctaatgccttttaccactggcaataccggaatgtttgccgcctggtaatccttaaagcggaaaatggcgatggcataggagtgaggcatctgccacaggctgaagatagccagcaggatcgctgcgccgctatcgaactcaccggttaccgcacagtagccgatcaccggcggcgcagcgccggagaggctaccaatcaacgtgccgtagacagagtggcgtttcatgtacaggctataaacgccgacataaaccacaaagcccatcacccccagccagcaggccagcggattcgcgccaaaccacagcagcataaagccagcaatacccagcaacgtggcgtacaccaggctgacagcaggagagatcaggcctttcaccagcacccgattcttcgtcctttccatctttctgtcgatatccctgtcgatgtagttgttaaacacacaaccgctcgccacaaccagactcaccccaaccagcgtgtagataaacaggggataatcaatgctgcccttactggccagcaggaatcccccaatcacgctgatcaggttgccaaagatgatgcctggtttcgttacttgcaggtattgcttaaacatcataaccgccgctcttagtgcatcatcatgttgtagttgaggttccacataatccagatggagcctacaaccaggatagcgatgattagcacggtgaagacaaacgccgtcatgttccagccttcatcacttttggtattcatgtgcaggaagcacaccagatgcaccagaacctgtaccactgccattgccaggattgttcccagaattacggccggagaggcagctcctgtcatcaccatccagaacggaatcaccgtcagaatgatgctcaggataaagcctgtcatgtaggtttttacgctgccatgggacgcgccgctgtgatcggtagaatgactcattacatcgccccccatcagataaacaacagtgaacacacagatccaaaccacatccaggaagtgccagaacaggctcaggcacatgatgcgggtacggttagtgctggtcaggccgcgacgggcgatttgcaccatcagcaccgccatccagataagaccagaagtgacgtgcagaccgtgcgtgccgaccagcgcaaagaacgcactcaggaagccgctgcgatccggacccatgccgttaacaatcaggtgatggaattcatagatttccatcccgataaatccggcaccaaacaaccaggtcaacgccagccaggagataacctggcttttgttgtttttgtacatggcgatagccgccatgccgtaggtgatggagctgaacaacagcaagaaagtttcaaccagaacgaacggcagttcgaaaatgtccttacctgtcgggccgcctgcggtgccgttcaccagaacggcataggtagcaaacaagatagagaacagaatgcagtcgctcatcaggtagatccaaaatccgaagattttggttccgcctgcatcgtggtgcccgtgttcgtgcgcgtgggcagtcgcgtgcgtcaaagtatcagttgccatttttcagccctgccttagtaatctcatcgaaatgctggttttccagtttttcgatttctgccaccggcacgtagtaatccacgtcctcgtcgaagcttttcacgatccaggtgatgatcatgcctgcgaagccaacaatcgccagccaccagatatgccagatcatggcgaaaccgaagatggtggagaaagctgcaatgacgatacctgcaccgctgtttttcggcatatgaatttcttcatagtggtcaggctttttatacgcttcgcctttctctttcatttcccagaatgcatcacgttcgtgaacgtgcggcactacggcaaagttatagaacggaggcggggaagaggttgcccactccagcgtacggccaccccacgggtcgccagtcaggtcacggttctggtcgcggtcgcgaatagaaacgtacatctgaataacgaggcagagaatacccagcgcaatcagtactgcaccgctggctgcaatcatcagcatggtgtggaactgcgggtcaatctgctggctcaaacgacgggtcatgcccatgaagcccagcgcatacagtggcataaaggcaacgaagaagccgatgatccagaaccagaacgcgcgtttaccccaggtttcgttcagtttgaaaccgaacgctttaggccaccagtaggtcatccctgcgaagcagccgaagaccacgccgccgatgatcacgttatggaagtgcgcaatcaggaacaggctgttatgcagaacgaagtccgcgcccggtacggccagcagcacgccagtcatcccgcccacgctgaaggtgacgataaaaccgatggtccacagcatcgcagaatggaacacgatgcggccctgatacatggtgaacagccagttgaagatcttcaccccggtcgggatggcgataatcattgtggtgataccaaagaaggcgtttacgttcgcgcccgcacccatcgtaaagaagtggtgcagccaaacgatgaagctcagcacggtgatacagacggttgcccataccaggctggtataaccaaacagacgtttacggctgaaggttgccgcaatttcggagaacacaccgaaaacaggcaggatcaggatgtaaacttccgggtggccccaggcccaaatcaggttgatgtacatcatcatgttgccacccatatcgttggtaaagaaatgggtgcccagatagcgatccagggtcaacaacgcgacggtaaccgtcagaattgggaaggaagcaataatcagtacgttcgcgcacagacttgcccaggtaaatactggcatcttgaacatggtcatgcccggtgcgcgcatcttcagaatggtaacgaagaagttgataccggtaagcgtcgtacctataccggatagctggagactccatatccagtaatcgacaccgactcccggactgtactctattccgcttagcggtggataggccagccagccggtctgcgcaaattcgcccacgccgagagaaacgttaaccagaatcacaccaacaacggtaaaccagaagcttaagttgttgaggaacgggaacgcaacgtcacgcgcgccgatctgcagcggaaccaccaggttcatcagaccgataacgaaaggcatcgccacgaagaagatcataatcacgccgtgcgcggtaaagatctgatcgtagtggtgaggtggcaggaagcccgcttcgcccgcgctggcaagagcctgctggctacgcatcataatggcgtcagcaaaaccacgcagcaacatcacaatcgccacgatgatatacatgataccgaggcgtttatggtcgacggaggtcagccactctttccacaggtaggtccacttaccgaagtaagtgatcaggccaacgagcgccagacctcccaaaataatgccagcgatcgtaaccatgacgataggttcatggaacgggactgcatcaagacttaattttccgaacatctttattcttcctcaacccctttaatgggcggattccgcgtggctcatgtccatgccttccataccttcgtgtgcgctgtgctcaccttctggctgggtcatgtccatgctcttaccgtgagccataaacttgttaattacatcggcaaacaagtctggtttcacgttggagaaatattccacctggttgtattcgctaggcgcggccagtttttcgaacgcagccatgtcagacatggtgttcgggctctgcttcgcttttgcgacccactggtcgaatgcggcgcgatccggtgttgcaatagctttgaacttcatgccactgaagcccgggccgctgtagctggcggagataccgtcataagtgccgggttcgttggcgatcagatgcaggcgagtctgcataccggccatggcataaatctggctacccagacgcggaatgaagaaggagttcatcacggagttggaggtcactttgaagtacaccggagtgttcgccgggaaagcgatttcattcacggtagcaatgccctgttccgggtagatgaagaaccatttccagtccatggaaaccacttcgatggtaatgggcttctcgtcgtgtgccagcggcttgctaggctcaagagcgtgagtggttttccaggtcagtactgcaaggaagatgatgattaagataggtaccgtccagaccacagcttccactttattggagtgactccagttcgggctgtacttagcatctttattgctcgcacggtacttccaggcgaaaccaacagccatcaagattgcgggaataacgacaatcaacatcaggccaaatgccgtcagtatcagactacgttgctccagaccaatctgtcctttgggatctaacagcgcagaattacagccactgagcaatacagtgcctgcaaataaactcaaccatcccaaacttttattgtatttcctgagtctcatttaacgacctcaattccacgggatctggtggcgtttaaagtgtgtgggcattttacgggaaggttacattactgtaaacatgattaaattcctgttacttggatttggctgccaggtcacatatgttgcaaaacatatcaggttgattttaagaagctgttgcaaaagggcgttataacaaaaggggagtgctgaaggagtctgggcgggcaattggtataaccaatgtgaaataaaacaattatttaacaaataattatcattagagtgacaactgggtgatgagaaaataaagactcattagctgaatcgtgtaagaaaaatagaatttataaatggcgccaataatttccaaacgctaagccgcacaaaagaacaaatattaataagcgatactgatgtttatttagccgtaataattacggcgagtgattactacagctaaataatatttacagattacgtcagatgcgtttttcgtagcgccagataatccagcaaaccaccaagcacgacgccagaaagggcgactaaaaccccgacttccagcagagcaggcaggaaagagaagtgcgtcaaatccagcgcgtccatcgtcaatagcagtaaccacacggccaacaggctgacgcccgccgccagtgtccacatggcaaaggcataacctgccggatatgcggtacgggagataaagttgtcatttactcgtgtatattcaagcgtctggcggcaaaccagcagcaaaataagccctggtacggcagcggcgacggagaatagatagaatgtgctccagccgtgtgcttcaacaaaccaacccgccacggggccgacataaactcgccctacagcagaaagcgcactgagcagggcaaattgagtagcggaaaaactcttattacatagcgtcattaacagcgcgacaaaggcacttgtgcccatcccgccacagaggttttcgaaaaagacggctgcgcccatgctgtagagatgcttatcagtaatgctcagcagccagtaaccggcgttagacgcaccttgtaaaatgccgaaaatcagcagtgcccggaacagactcaggcgctgcatcaaaatcccaccgtacaatgcgccaacaatggtcgctagtaagccaagcgttttgttaaccacgcctacttcacccgcatcaaacccgacgccgcgaatcaaaaacgtggttgtcaggctcatggcgaatgcgtcgcccagcttatacagcacgataagaagcaaaataagccaggcattattgcgaccaaagaaatctcgcagaggtgcaacaaccgcttgttccagcgttttgggcacaggaatggtgtcggttggttctggtgcaagcaacgtcgcgataatacaggggatcaacagtgccgccattaaccagtacatgccctgccagcccagccatttatctgccagccacagggctaggccgccggaaaccagcatccctaaacggtaacccagcacgctgattgccgcgcccgcaccacgttcttctgccggaagcacatcggttttccacgcatcgaagactatatcctgggaagcagagcaaaaagcgatcaccactgccagcgccgccatccagcggagttgggtgcctggttcgagaaaacccatcgccgcaatggcgactaataacaggatttgcgtggcgagcagccaaccgcgccgccgcccaaaaaatggaggcgtgtagcggtccatcagcggactccagaggaatttaaaaacgtaagcctggcctaccagagagaagaaaccaatggttttgagatcgatattctcgaccgtcatccaggcctgtaaggtaccggatgtcagggcgagcggtagcccggaagcaaaacccaggatcagcaatatggcactacgcggctgttgaaaaatacgtaaatattgactggacatgggcgtctacaggcccggcttgcaccgggccagagggcagaaattaacgcgcgttctgcttgatgaattcgtggatgctggtgtcctgagacatatcagcgatggtatcggtcagcacactgttaaccgcatcggcgatatttttgttggaggcctggaacgcaccttcaacgttgtagctggcacgatagtttttggtcattttgttgccattctgcgcggtagcgatgatggcgatatccgctttggtcgcgatgttgtagcgcacgttgccctgggacacgtcagcatacagttggctaacgatgatttgcagattaaccgggccattcggaccaaccatgtaaccacgcgcggtcatctgtttttccagcacttcttgcagcaggaaacgcagatcgcgggaggcggtcagggtaacgatttgattatcgcgggtgacttttgccagcgcctgatcggtacgctgatcggcaccattaatgcttacggtgacgcccatcaggcttggatcctgctgtggcagtgtaatcgtcggggaaacttcaatagttgttggcggttttgcgcatcctgcaagcataaacagagcaactaacgggaagaggatttttttgaacatgttcgggctctcagagactcttaagcgtgtttggtaaaaattcccgccatcataacattgccaacggcgaggggaagtgggtaaggcatgtaaattcatcatgttgacgaaataatcgcccctggtaaaagaaacactgatgcgaggcctgtgtttcaatctttaaatcagtaaacttcatacgcttgacggaaaaaccaggacgaaacctaaatatttgttgttaagctgcaatggaaacggtaaaagcggctagtatttaaagggatggatgacatctcagcgttgtcggaggagatatttcatgatgatacgtgagcggatagaagaaaaattaagggcggcgttccaacccgtattcctcgaagtagtggatgaaagctatcgtcacaatgtcccagccggctctgaaagccattttaaagttgtgctggtcagcgatcgttttacgggtgaacgttttctgaatcgtcatcgaatgatttacagtactttagcggaggaactctctactaccgttcatgcgctggctctgcatacttacactattaaggagtgggaagggttgcaggacaccgtctttgcctctcctccctgtcgtggagcaggaagcatcgcgtaaaaacgcatttgcaactgtcggcgcttttccagtatgttgctaaagattttatgaaaaacggcctgcgggccgttttgttttgtctggattttgcgctttttgcccagcattcagacgaaaattgcccgggaattgtgaaaaaatacgcgacagcgcgcaataaccgttctcgactcataaaagtgatgccgctataatgccgcgtcctatttgaatgctttcgggatgattctggtaacagggaatgtgattgattataagaacatcccggttccgcgaagccaacaacctgtgcttgcggggtaagagttgaccgagcactgtgattttttgaggtaacaagatgcaagttagtgttgaaaccactcaaggccttggccgccgtgtaacgattactatcgctgctgacagcatcgagaccgctgttaaaagcgagctggtcaacgttgcgaaaaaagtacgtattgacggcttccgcaaaggcaaagtgccaatgaatatcgttgctcagcgttatggcgcgtctgtacgccaggacgttctgggtgacctgatgagccgtaacttcattgacgccatcattaaagaaaaaatcaatccggctggcgcaccgacttatgttccgggcgaatacaagctgggtgaagacttcacttactctgtagagtttgaagtttatccggaagttgaactgcagggtctggaagcgatcgaagttgaaaaaccgatcgttgaagtgaccgacgctgacgttgacggcatgctggatactctgcgtaaacagcaggcgacctggaaagaaaaagacggcgctgttgaagcagaagaccgcgtaaccatcgacttcaccggttctgtagacggcgaagagttcgaaggcggtaaagcgtctgatttcgtactggcgatgggccagggtcgtatgatcccgggctttgaagacggtatcaaaggccacaaagctggcgaagagttcaccatcgacgtgaccttcccggaagaataccacgcagaaaacctgaaaggtaaagcagcgaaattcgctatcaacctgaagaaagttgaagagcgtgaactgccggaactgactgcagaattcatcaaacgtttcggcgttgaagatggttccgtagaaggtctgcgcgctgaagtgcgtaaaaacatggagcgcgagctgaagagcgccatccgtaaccgcgttaagtctcaggcgatcgaaggtctggtaaaagctaacgacatcgacgtaccggctgcgctgatcgacagcgaaatcgacgttctgcgtcgccaggctgcacagcgtttcggtggcaacgaaaaacaagctctggaactgccgcgcgaactgttcgaagaacaggctaaacgccgcgtagttgttggcctgctgctgggcgaagttatccgcaccaacgagctgaaagctgacgaagagcgcgtgaaaggcctgatcgaagagatggcttctgcgtacgaagatccgaaagaagttatcgagttctacagcaaaaacaaagaactgatggacaacatgcgcaatgttgccctggaagaacaggctgttgaagctgtactggcgaaagcgaaagtgactgaaaaagaaaccactttcaacgagctgatgaaccagcaggcgtaatttacgcagcataacgcgctaaattcgcacaaaggcccgtcaccgccaggtggtgggcttttttttgtcatgaattttgcatggaaccgtgcgaaaagcctctttcggtgttagcgtaacaacaaaagattgttatgcttgaaatatggtgatgccgtacccataacacagggactagctgataatccgtccataaggttacaatcggtacagcaggttttttcaattttatccaggagacggaaatgagttacagcggcgaacgagataactttgcaccccatatggcgctggtgccgatggtcattgaacagaccagtcgcggtgagcgctcttttgatatctattctcgtctacttaaggaacgcgtcatttttctgactggccaggttgaagaccacatggctaacctgattgtggcgcagatgctgttcctggaagcggaaaacccagaaaaagatatctatctgtacattaactccccaggcggggtgatcactgccgggatgtctatctatgacaccatgcagtttatcaagcctgatgtcagcaccatctgtatgggccaggcggccagcatgggcgctttcttgctgaccgcaggggcaaaaggtaaacgtttttgcctgccgaatagccgcgtgatgattcaccaaccgttgggcggctaccagggccaggcgaccgatatcgaaattcatgcccgtgaaattctgaaagttaaagggcgcatgaatgaacttatggcgcttcatacgggtcaaagtttagaacagattgaacgtgataccgagcgcgatcgcttcctttccgcccctgaagcggtggaatacggtctggtcgatagcattctgacccatcgtaattgatgccagaggcgcaactgtgccgctatacttatccagggcggcacaacgctgtaagcggcttgcgcctgagaatggcatttgcgtcgtcgtgtgcggcacaaagaacaaagaagaggttttgacccatgacagataaacgcaaagatggcagtggcaaattgctgtattgctctttttgcggcaaaagccagcatgaagtgcgcaagctgattgccggtccatccgtgtatatctgcgacgaatgtgttgatttatgtaacgacatcattcgcgaagagattaaagaagttgcaccgcatcgtgaacgcagtgcgctaccgacgccgcatgaaattcgcaaccacctggacgattacgttatcggccaggaacaggcgaaaaaagtgctggcggtcgcggtatacaaccattacaaacgtctgcgcaacggcgataccagcaatggcgtcgagttgggcaaaagtaacattctgctgatcggtccgaccggttccggtaaaacgctgctggctgaaacgctggcgcgcctgctggatgttccgttcaccatggccgacgcgactacactgaccgaagccggttatgtgggtgaagacgttgaaaacatcattcagaagctgttgcagaaatgcgactacgatgtccagaaagcacagcgtggtattgtctacatcgatgaaatcgacaagatttctcgtaagagtgacaacccgtccattacccgagacgtttccggtgaaggcgtacagcaggcactgttgaaactgatcgaaggtacggtagctgctgttccaccgcaaggtgggcgtaaacatccgcagcaggaattcttgcaggttgatacctctaagatcctgtttatttgtggcggtgcgtttgccggtctggataaagtgatttcccaccgtgtagaaaccggctccggcattggttttggcgcgacggtaaaagcgaagtccgacaaagcaagcgaaggcgagctgctggcgcaggttgaaccggaagatctgatcaagtttggtcttatccctgagtttattggtcgtctgccggttgtcgcaacgttgaatgaactgagcgaagaagctctgattcagatcctcaaagagccgaaaaacgccctgaccaagcagtatcaggcgctgtttaatctggaaggcgtggatctggaattccgtgacgaggcgctggatgctatcgctaagaaagcgatggcgcgtaaaaccggtgcccgtggcctgcgttccatcgtagaagccgcactgctcgataccatgtacgatctgccgtccatggaagacgtcgaaaaagtggttatcgacgagagcgtaattgatggtcaaagcaaaccgttgctgatttatggcaagccggaagcgcaacaggcatctggtgaataattaaccattcccatacaattagttaaccaaaaaggggggattttatctcccctttaatttttcctctattctcggcgttgaatgtgggggaaacatccccatatactgacgtacatgttaatagatggcgtgaagcacagtcgtgtcatctgattacctggcggaaattaaactaagagagagctctatgaatcctgagcgttctgaacgcattgaaatccccgtattgccgctgcgcgatgtggtggtttatccgcacatggtcatccccttatttgtcgggcgggaaaaatctatccgttgtctggaagcggcgatggaccatgataaaaaaattatgctggtcgcgcagaaagaagctagtacggatgagccgggtgtaaacgatcttttcaccgtcgggaccgtggcctctatattgcagatgctgaaactgcctgacggcaccgtcaaagtgctggtcgaggggttacagcgcgcgcgtatttctgcgctctctgacaatggcgaacacttttctgcgaaggcggagtatctggagagcccgaccattgatgagcgggaacaggaagtgctggtgcgtactgcaatcagccagttcgaaggctacatcaagctgaacaaaaaaatcccaccagaagtgctgacgagcctgaatagcatcgacgatccggcgcgtctggcggataccattgctgcacatatgccgctgaaactggctgacaaacagtctgttctggagatgtccgacgttaacgaacgtctggaatatctgatggcaatgatggaaagcgaaatcgatctgctgcaggttgagaaacgcattcgcaaccgcgttaaaaagcagatggagaaatcccagcgtgagtactatctgaacgagcaaatgaaagctattcagaaagaactcggtgaaatggacgacgcgccggacgaaaacgaagccctgaagcgcaaaatcgacgcggcgaagatgccgaaagaggcaaaagagaaagcggaagcagagttgcagaagctgaaaatgatgtctccgatgagcgcagaagcgaccgtagtgcgtggttatatcgactggatggtacaggtgccgtggaatgcgcgtagcaaggtcaaaaaagacctgcgtcaggcgcaggaaatccttgataccgaccattatggtctggagcgcgtgaaagatcgaatccttgagtatcttgcggttcaaagccgtgtcaacaaaatcaagggaccgatcctctgcctggtagggccgccgggggtaggtaaaacctctcttggtcagtccattgccaaagccaccgggcgtaaatatgtccgtatggcgctgggcggcgtgcgtgatgaagcggaaatccgtggtcaccgccgtacttacatcggttctatgccgggtaaactgatccagaaaatggcgaaagtgggcgtgaaaaacccgctgttcctgctcgatgagatcgacaaaatgtcttctgacatgcgtggcgatccggcctctgcactgcttgaagtgctggaaccagagcagaacgtagcgttcagcgaccactacctggaagtggattacgatctcagcgacgtgatgtttgtcgcgacgagcaactccatgaacattccggcaccgctgctggatcgtatggaagtgattcgcctctccggttataccgaagatgaaaaactgaacatcgccaaacgtcacctgctgccgaagcagattgaacgtaatgcactgaaaaaaggtgagctgaccgtcgacgatagcgccattatcggcattattcgttactacacccgtgaggcgggcgtgcgtggtctggagcgtgaaatctccaaactgtgtcgcaaagcggttaagcagttactgctcgataagagtttaaaacatatcgaaattaacggcgataacctgcatgactatctcggtgttcagcgtttcgactatggtcgcgcggataacgaaaaccgtgtcggtcaggtaaccggtctggcgtggacggaagtgggcggtgacttgctgaccattgaaaccgcatgtgttccgggtaaaggcaaactgacctataccggtagcctcggcgaagtgatgcaggagtccattcaggcggcgttaacggtggttcgtgcgcgtgcggaaaaactggggatcaaccctgatttttacgaaaaacgtgacatccacgtccacgtaccggaaggtgcgacgccgaaagatggtccgagtgccggtattgctatgtgcaccgcgctggtttcttgcctgaccggtaacccggttcgtgccgatgtggcaatgaccggtgagatcactctgcgtggtcaggtactgccgatcggtggtttgaaagaaaaactcctggcagcgcatcgcggcgggattaaaacagtgctaattccgttcgaaaataaacgcgatctggaagagattcctgacaacgtaattgccgatctggacattcatcctgtgaagcgcattgaggaagttctgactctggcgctgcaaaatgaaccgtctggtatgcaggttgtgactgcaaaataatgacctcgcgcaaaatgcactaataaaaacagggctggcaggctaattcgggcttgccagcctttttttgtctcgctaagttagatggcggatcgggcttgcccttattaaggggtgttgtaaggggatggctggcctgatataactgctgcgcgttcgtaccttgaaggattcaagtgcgatataaattataaagaggaagagaagagtgaataaatctcaattgatcgacaagattgctgcaggggctgatatctctaaagctgcggctggccgtgcgttagatgctattattgcttccgtaactgaatctctgaaagaaggggatgatgtagcactggtaggttttggtacttttgccgttaaagagcgtgctgcccgtactggccgcaacccgcagaccggtaaagagatcaccatcgctgctgctaaagtaccgagcttccgtgcaggtaaagcactgaaagacgcggtaaactaagcgttgtccccagtggggatgtgacgaagttcaagggcgcatctactgatgtgccttttttatttgtattcggtgactttctgcgtcttgtgggctgacaattgcccccgtttcttgtcacaataggcctttgcgcgcatcgatacgttgcgtgaggtacacagtcatctacagcggagtgttgttacaccatgatggacagcttacgcacggctgcaaacagtctcgtgctcaagattattttcggtatcattatcgtgagcttcatattgaccggcgtgagtggttacctgattggcggaggcaataactacgccgcaaaagtgaatgaccaggaaatcagccgtgggcaattcgagaacgccttcaacagcgagcgtaatcgcatgcagcaacagctgggcgatcaatactccgagctggcagcgaacgaaggctatatgaaaaccctgcgtcaacaggtgctgaatcgtctgatcgacgaggcgctgctggatcagtacgcacgtgagctgaaactgggtatcagcgatgagcaggttaaacaggcgattttcgcgaccccagccttccaggttgacggcaaatttgataacagccgctataacggtatcctcaaccagatggggatgaccgccgatcagtacgcccaggcgctgcgtaaccagctcactacccaacagctgattaacggcgttgccggtaccgattttatgctgaaaggtgaaaccgacgagctggcggcactggtcgcgcaacaacgcgtggtgcgtgaggcgactatcgatgttaacgcgctggcggcgaagcagcctgtgaccgaacaggagattgccagctactacgaacaaaacaaaaacaatttcatgacgccggaacaattccgcgtgagttacatcaagctggatgccgcaacgatgcagcaaccggttagcgatgcggatatccagagctactacgaccagcatcaggatcaattcacccagccgcagcgtacccgctacagcatcatccagaccaaaactgaagatgaagcgaaagcggtacttgatgagctgaataaaggcggtgattttgctgcattagccaaagaaaaatctgccgatattatctctgctcgtaacggcggcgatatgggttggttagaagatgccactatcccggacgaactgaaaaatgctggtctgaaagaaaaaggccaactgtctggtgtcatcaaatctagcgtcggtttcctgattgtacgtctggacgacattcagccagcgaaagtgaaaagcttagacgaagtacgtgacgacattgcggcgaaagtgaaacacgaaaaagccctcgatgcgtactacgcgctgcagcagaaagtgagcgatgcggcaagcaacgacaccgagtctctggccggtgcagagcaagctgccggcgttaaagccactcagacgggttggttcagcaaagataacctgccggaagagttgaacttcaagccggttgccgacgctatctttaacggcggtctggtaggtgaaaacggcgcgccgggcatcaactctgacatcatcaccgtagacggcgaccgcgcattcgtgctgcgcatcagcgagcacaaaccggaagcggtgaaaccgttggcagatgttcaggaacaagttaaggcattggttcagcacaacaaagctgaacaacaggcgaaagtggatgctgagaaactgctggttgatttgaaagccggcaaaggtgcggaagctatgcaggctgccggtctgaaatttggcgagccgaaaaccttaagccgttccggtcgtgacccgattagccaggcggcgtttgcactgccactgccagcgaaagacaaaccgagctacggtatggcgaccgatatgcaaggtaatgtggttctgctggcgctggatgaagtgaaacaaggtagtatgccggaagatcagaaaaaagcgatggtgcagggtatcacccagaacaacgcacaaatcgtctttgaagctctgatgagtaacctgcgtaaagaggcgaaaatcaaaattggcgatgcgctggaacagcaataatcctgaagccgcctcgcaaaaaaatgcgttgcagctgtaacaagaaaaggtcgctttcgcggccttttccatttctgaacattgccatttgtttactgttttcactgccgttaaggtgattccactgttaacaaacaaggagaaaacagtatgaaacacggaattaaagcactgctcattaccctgtccctggcctgtgccggaatgtctcatagcgcgctggcggcagcttctgtggcgaaaccgacggcggtagaaaccaaagcggaagctcctgcagcacaaagtaaagcagcagtaccggcgaaagccagtgacgaagaaggcacccgggtcagcattaataatgccagcgcggaagagctagcccgcgcgatgaatggcgttggcctgaagaaagcgcaggcgattgtcagttatcgcgaagagtacggtccgtttaaaactgtggaggatctaaagcaggtgccggggatgggcaatagcctggtggaacgtaatctggcggtattaaccctgtaattaatttgcatagtggcaattttttgccagactgaagaggtcataccagttatgacctctgtacttataacaacaacgtaaggttattgcgctatgcaaacacaaatcaaagttcgtggatatcatctcgacgtttaccagcacgtcaacaacgcccgctaccttgaatttctcgaagaagcccgctgggatgggttggaaaatagcgacagttttcagtggatgacggcccataacatcgccttcgtcgtggtcaatatcaatattaactatcgtcgcccagcggtattaagtgacctgttaactattaccagtcagttgcagcaattaaacggtaaaagcggcatcttaagccaggtcattacactggagccggaagggcaggtggtagcggatgcgcttattacgtttgtttgtattgatcttaaaacgcagaaagcattagctctggaaggggaattgcgcgaaaagctggagcagatggttaagtaaacgttttgtggtgccggatgctcaagccgcatccggcgacacccggaataattacctcaacccggttttctgcttcatcgctgccatcaccgtcggtttatcggccagataatgattcaaaccgttggcgcgtaaattacatgccgcacaatgaccgcaaccgtcgcctttaaagccgttatagcaggtcaacgtttcgttacggactaaatccagtttgccgtaataatctgccagcgcccaggtttccgctttatcaatccacatcagcggcgtttcaaaacgaatatctttcgccatgcccaaactgacggcatggtttagtgctttcacaaactcatcgcggcaatccgggtagccggagaaatccgtttcgcagacgccagtaattacggcttctgcttttacctgatacgcatatattgccgccagcgtcaggaacaaaatattacgccctgggacaaacgtattcgggataccatcggcttcaggttcataatcaggcaccggaatgctgtcacgcgtcaggctactgaccgccagctcgttgagcagggtgacatccagcaccttatgcgcgcgtgcccccagtttcagcgccagttcgcgtgccacgtcgatttctgcgcgatgccgctgaccgtaatcgaacgtcacgcaatggacttcatcatattgttgtaatgcctgcaccagacaggtggtggaatcctgacctccactgaacacaacgacagcacgtttcatagataatcctgcttgaacaataaaagcgttatggtaacgcctgcgattaacccggaccagctattcattggcttggcgcgggaagccaggcttcggtaaattcaaaccagccgcgcggtgtcagtcgcacaccgttcacgccgggaggggcactaatgcgatagtgatagttgaacagcggcgtcagcgtcgcatctgtcattaactggctaaaaaccgctttcagggcattaaatcggttttcttcatcaggcattatttgcacggcatccagtgtgctttgtagatgtgcgtatgctggagcgtcgaaaacatgtggccacagcggatcgcagcgcagccattgctccagagtatattccggtgcttcgccaattaatctgtcgcccatcatgaggtctgcgtgtgcctgtagggtcgtgtcgtcccagttttttgcgttatgaaaaataattgtgagttcacagccttccgctgccagtgtcgcctgtaggcgttctgccatggtatgaagttctatcggtaggtgataaaccagcgtcaaggttttcggtagtttgacttcatccggtacctgccaatgcggaatagtccagcctggcagtaatgcatgactggcggtgatcaggttttctccgacttctaacgtttgtaataaaccggattgatgaataatggagatcacttttcgcgcctgccagagggagagtcggggacttttgcgcaacgtcaaatagcaaaaacctaaactgatgccgctactgacctggctgacccgttgcagctcctccggtttgccgatggtgatttgcacgggatgccgacaactggttcccaaatctttttcgaaaagcggcggagttatccagtactcaaccgctttaagcagcggatgacgtaaatggtaataatcatggctttccaggcgcaccagctctgctgtgaattgtgttaagcgaaaaggacccgtgccgatcagtgggaattgcggatgcgccagatggctgcaatagctcgccagccggtgcgcaagccagtaatcagggcgatgtaaaaagaaggtcagacactgcggatgggtgacttcaatacgcttcacgctaataaataattgatccagtgctggcagttgtaacagcatcaataatcgctggtgtaagtgactggcttttactgcatcgccgttatgccagtgtagggtactacgaagataaaagtcccagcgtaacccgtcagtagaggtttcccagtgatgcgctaaatcgccaatcgggcgctgagtattattatcgaagcgggtcaggccggaaaatatctgcccggcgagatgctgctcggcacggccgggcaaaaagcctggttgtagcggttcgagcgggcgatagtagggaatacgcaacgtgggtgtatcgttttgccattgtccgcccataaacggctgtaacagagtgcgcagctcacctggggccagttgcgccagctccagcacatcttgctgctttccggtttccagtgcctgttccatcatcgcattgcgtaggctttccggcgtgaccagaaagcgtaattgtccgcgctttccgcgtccactctgcgcctgccactccagccatcccgcctcctgtgcctgacgcaacagcgtacgaacatggcgttcgctgcaaaaacagcgttcggccagttcgctgacggtgacggtttgcggctttccggcggaaggttgccacagacgttgatactggttaagacggttgagcaatcgcatataaacccggaacaatattatttaactattcactattacttccgtatatatcaggtgatactcaatcaccattaaccgtgtcacagagtggagaaagaaatggctcgtctggcagcatttgatatggatggcactttattgatgcccgaccatcatttaggtgagaaaaccctctctactttggcgcgactgcgtgaacgcgacattaccctcacttttgccacggggcgtcatgcgctggagatgcagcatattctcggggcgctaagcctggatgcgtatttgattaccggcaacggaacgcgcgtgcattctctggaaggtgaacttttacatcgtgatgatttacctgcggatgtcgcggagctggtgctgtatcagcaatgggatacccgagccagcatgcatatcttcaatgacgacggttggtttaccgggaaagagatccctgcgttgttgcaggcatttgtctatagcggttttcgttatcagataatcgatgtcaaaaaaatgccactcggcagcgtcaccaagatctgcttctgtggcgatcacgacgatcttacacgcttgcagatccagctatacgaagcattaggcgagcgtgcacatttgtgtttttccgccacggattgcctcgaagtgctgccggtgggctgcaataaaggcgctgcattgacggtgctgacccaacatttaggtttaagcttgcgcgattgcatggcctttggtgatgcgatgaacgatcgcgaaatgttagtcagcgtcggtagcggatttattatgggcaatgcgatgccgcaactgcgcgcggagctcccgcatttaccggtgattggacattgccgaaatcaggctgtctctcactatttgacgcactggctggactatccacatctaccttattcccccgaataacgagatcccttccagcaccgggcaattgcccggttttttttgcgttgaatttgtcattttgtgccgtggtgtttaaaccgcacagaataaattgtcgtgatttcacctttaaaataaaattaaaagagaaaaaaattctctgtggaagggctatgttagataaaattgaccgtaagctgctggccttactgcagcaggattgcaccctctctttgcaggcactggctgaagccgttaatctgacaaccaccccttgctggaagcgcctgaaacggctggaggacgacggtatccttatcggcaaagtcgccctgctggatccggaaaaaataggcctcggcctgaccgcttttgtgctgataaaaacgcaacatcacagcagcgaatggtattgccgctttgtcacggtggttaccgaaatgccagaagtgctggggttctggcgcatggctggtgaatacgattatctgatgcgcgtccaggttgccgacatgaaacgctacgacgagttttataagcgtctggtaaacagcgtgccggggctgagcgacgtcacttccagcttcgcgatggaacagattaaatacaccacttctttacccatcgaataaatatccagaatcaggtcaggacacaacgcgtgcgattatttgctcaattaagctggtatttccgtcgggaatggcgtcgctatctcggggctgtcgccttgcttgtcattatcgcgatgctgcaactggttccgccaaaagtggttggtattgttgtcgatggcgtgacagaacaacactttactaccgggcagatcctgatgtggatcgccaccatggtgctgattgccgttgtggtttatctcctgcgttacgtctggcgggtattgctgtttggtgcgtcttatcaactggctgttgaactgcgtgaagattattaccgtcagctaagccggcagcatcctgagttttacctgcgtcatcgcaccggtgacctcatggctcgtgcgaccaatgacgtcgatcgcgtcgtgtttgccgccggagaaggggtgctgacgctggtggatagtctggtgatgggctgcgctgtgttgattatgatgtctacgcaaattagctggcagttgaccttattttccctgttgccgatgccagtgatggcgatcatgattaagcgcaacggcgatgctttgcatgaacgctttaagctggcacaggcggcgttttccagtcttaatgaccgcacccaggaaagcctcaccagtatccgcatgatcaaagcctttggtctggaagatcgccagagcgcgttatttgccgcggatgccgaagataccggcaaaaaaaacatgcgggtggcgcgtattgatgctcgtttcgacccgaccatctatatcgcgattggtatggcgaacttgctggcgattggcggcggtagttggatggtggtgcagggcagtttaacgctgggccagctcaccagttttatgatgtatttaggtctgatgatttggccaatgctggcgctggcatggatgtttaacattgtggaacgtggtagtgctgcgtacagccgtattcgcgcgatgctggcggaagcgccggtggtgaacgatggtagcgaacccgtgccggaagggcgtggcgaactggatgtaaatattcaccagttcacgtatccgcagactgaccatcctgcgctggaaaacgtcaatttcgccctgaaacccggtcagatgctgggtatctgcgggccgactggttccggcaaaagtaccctgttgagcctcattcagcgtcatttcgacgtcagcgagggggatattcgctttcatgatattcctctgacgaagttacaactcgatagctggcgtagccgcctggcggtagttagccagacgccattccttttttctgacactgtggcgaataacatcgcgctgggttgcccgaatgccacccagcaagagattgagcatgtcgcgcggttagccagcgtacatgacgatattttgcgtctaccgcaaggttacgatacagaggtgggcgagcgcggtgtgatgctttccggcgggcaaaaacagcgtatctccattgctcgtgcgttattagtcaacgcggaaatcctcatccttgatgatgcgcttagcgcggtggacggacgcactgagcaccagatcctgcataacctgcgtcagtgggggcagggaagaacggtaatcatcagtgcccatcgcctttctgcactgacggaagccagtgaaattattgtgatgcagcacggacatatcgcccagcgtggcaatcatgatgtgctggcacaacaaagcggctggtatcgcgatatgtatcgctatcaacaactggaggcggcgctcgacgacgctccggaaaatcgcgaggaggccgtcgatgcgtaactaaaaatcgcgaggaggccgtcgatgcgtagttttagccaactgtggccgactctcaagcgcctgttagcgtacggtagcccgtggcgtaaaccgctggggattgcggtcctgatgatgtgggttgcggcggcggcagaagtcagtgggccgctgcttatcagctattttatcgacaatatggtagcgaaaaataacctgccgttgaaagtggttgcagggctggctgcggcgtatgttgggctgcaactgtttgccgccgggctacattacgcgcagagcctgctgtttaatcgggcggcagtaggcgtagtgcaacagttgcgtaccgacgtgatggatgctgcgttacgccagccattaagcgagtttgatacccaacccgtcgggcaggtgatttcccgcgtcactaatgacactgaagtgatccgcgatctctacgttaccgtagtggcaactgtcctgcgcagtgccgcgctggtgggcgcgatgctggtggcgatgttcagcctcgactggcgaatggcactggtggcgataatgattttcccggtggtgctggtggtaatggtgatataccagcgttacagcacgccgattgtccgtcgtgtgcgcgcctatttggcggatatcaacgacggctttaacgaaatcatcaatggcatgagcgttatccagcagtttcgtcagcaggcgcgatttggcgaacgtatgggggaggccagtcgtagtcactatatggcgaggatgcaaaccctgcgcctcgacggttttctgctgcgtccgctgctgagtctgtttagtagcctcattctttgtggcttgttgatgctgtttggcttctccgccagcggcaccattgaagtgggcgtgctgtatgcgtttatcagctatcttgggcgacttaacgaaccattaatcgaactgaccacgcaacaggcgatgctgcaacaggctgttgttgctggtgagcgcgtgtttgaactgatggacggaccgcgccagcaatatggcaatgatgatcgcccgttacagagtggcaccatcgaagtcgataacgtgagttttgcttatcgcgatgacaatctggtgctaaagaacattaatctctctgtgcctagccgcaattttgtggcgctggtcgggcataccggcagtggcaaaagcaccctcgccagtttattgatgggctattacccgctaacggaaggtgagattcgccttgatggtcgtccattaagtagcctaagtcacagcgcgctgcgccagggcgtggcaatggtgcagcaagatccggtggtgctggcggataccttcctcgccaacgtgacgctggggcgggatatctccgaagaacgcgtctggcaggcgctggaaaccgtgcaactggcggagctggcgcgtagcatgagcgacggtatttacacgccgctgggcgagcaggggaataatctcagtgttgggcaaaagcaactgctggcactggcgcgcgtgctggtcgagacgccgcaaatcctgatccttgatgaggcaaccgccagcattgactccggtactgaacaggcgattcaacatgctctggcggcggtgcgtgaacataccacgctggtagtgattgctcaccgcttaagcaccattgttgatgccgacaccattctggtgcttcatcgtgggcaagccgtggagcagggcactcaccagcaactgctggcggcccagggacgctactggcagatgtatcaactgcaacttgcgggcgaagagctggcagccagcgtgcgtgaagaggaaagtttgagcgcctgaatagcgcaatatttcatcgttggtgcaaaaatgtaacgcactgtgcactgtcatagtgcgttttcattttcaaacttcttaacttcctgctctctttctcgtttttcatttctggcacaccgcttgcaataccttcttcgtgtagcagaaccattaccgaattctgaccggaggggatctatgaagctggtgaccgtgataatcaaaccattcaagctggaagacgttcgtgaagcgttatcttccattggtattcagggcctgaccgtcaccgaagtgaaaggtttcgggcgtcagaaagggcatgccgagctgtaccggggggcggaatacagcgtcaatttcctgccaaaagtaaaaattgatgtggcgattgctgatgaccaactcgatgaagtgatcgatatcgtcagtaaggcggcttacaccggaaaaattggcgacggcaaaatcttcgtcgctgaattgcaacgcgtcattcgtattcgtaccggcgaagccgacgaagcggcgctgtaatctctggcacacagcaacaggaacgaaaaatgaagatagcgacgataaaaactgggcttgctagtctggcgatgcttccgggactggtaatggctgcacctgcggtggccgataaagccgacaatgcgtttatgatgatttgtactgcgctggtgctgtttatgactattccggggattgccctgttttacggtgggttgattcgcggcaaaaacgtgctgagcatgctgacgcaggtgacggtgacatttgcactggtctgtattctctgggtggtttacggttacagcctggcgtttggtgagggcaacaacttcttcggcaacattaactggttgatgctgaaaaacatcgaactgacggcggtgatgggcagcatttatcagtatatccacgtggcgtttcagggaagctttgcctgcattaccgtcggcttgatagttggggcgctggcggaacgaatccgcttcagtgctgtgttgattttcgtggtggtatggctgacgctctcttacattccgattgcgcatatggtgtggggcggtggtttgctggcttctcacggtgcgctggatttcgcgggtggcaccgtggtgcacattaacgccgcaatcgccggtctggtgggcgcgtatctgataggaaaacgcgtgggcttcggtaaagaggcgtttaaaccgcacaacctgccgatggtcttcaccgggactgccattctctatatcggttggtttggctttaacgccgggagtgcgggcacggcgaatgaaatcgcggcactggcatttgtgaatactgtggtcgcaacggcggcggcaattcttggctggatcttcggtgaatgggcgctgcgtggtaagcctagtctgctgggggcgtgttctggcgcgattgccggtctggtcggcgtgacgccagcctgcggctacattggggttggcggcgcgttgattatcggcgtggtagctggtctggcgggcttgtggggcgttaccatgctcaaacgcttgctgcgggtggatgatccctgcgatgtcttcggtgtgcacggcgtttgtggcattgtcggctgtatcatgaccgggatttttgccgccagcagcctgggcggcgtgggcttcgctgaaggtgtgacgatgggccatcagttgctggtacagctggaaagcatcgccattacgatcgtctggtccggtgttgtggcatttatcggctacaaattggcggatctgacggttggtctgcgtgtaccggaagagcaggagcgagaagggctggatgtcaacagccacggcgagaatgcctataacgcgtaacaagcactgcaaaaaacagccggacggttttcacctccggctatttttttaattgtgattacgcatcaccccttcctgaacggtgctggcaaccagtacgccgtcttgggtataaaactcaccgcgcacaaagccacgtgcgctggacgcgctggtgctctccacgctatacagcagccattcattcaaattaaacgggcgatggaaccacatggaatggtcaatggtggcaatctgaatccccggttcgagaaaaccgatgccgtgcggctgtagagctaccggcaggaagttaagatcagaagcgtaaccgagcagatactgatgaacgcgcaggtcatccggcacgctaccatttgcgcggatccacacctgacgatgtggttctgcgacgtgacctttcagtgggttatgaaactccaccggacggacttccagcggacgatcgcagatgaatttatctttcagcactggcggcagcaggtgcgccaggctttgggcgatttgcgtttcgctagggaggccatcaggcgctggcgcggacggcattgttttttgatgttcgaaacccgcttctggtgcctggaaagaggcagtcatataaaaaatcggtttgccgttttgaatagcagcaacccggcgggcgctgaagctgttaccgtcacgcagcgtttcgacatcataaataatcggcttcttactatcgccagggcgaagaaagtagctgtgaaagctatgtaccagccgctcttcagggacggtctcttttgcagcatacaaggcctgacccacgacctggccgccaaacacctggcgtaaacctaaatcttcactctggccgcgaaagagtccttcctcaattttttccagatttaacaatgtcagtaaattttttagcgcctgactcatataactctccagtaacaaagctgccgcagcaagccaaagtgagttgagtataacgcaaatttgctactggtccgatgggtgcaatggtctgaattacgggctaattacaggcagaaatgcgtgatgtgtgccacacttgttgacgttactattttgttaaccactcttccggcgaggaaagttagcccgctggtgcattgataataaggagaaatgaatgaaactcgtgcacatggccagtggtttagcggttgcgattgcgttggcggcttgcgcagataaaagcgcggatattcagacgccagcaccggctgcaaatacgtctattagtgcaacacaacaaccagctatccagcaaccgaatgtctccggtaccgtctggatccgtcagaaagtcgcactgccgcctgatgctgtgctgaccgtgacactttctgacgcgagcttagccgatgcaccgagtaaagtgctggcgcagaaagcggtgcgtactgaaggtaaacagagtccattcagctttgttctgagttttaacccggcagatgttcagccgaacgcgcgtattctgttgagtgcggcgattaccgtgaatgacaaactggtatttatcaccgataccgttcagccggtgatcaaccagggcggaactaaagccgacctgacattggtgccggtacagcaaaccgccgtgccggttcaggccagcggtggcgcaacgactaccgtacctagcactagtccaactcaggtgaatccgtctagcgcagttccagctcctacgcaatattaagcgacgttaaccctctccgcccggagagggttagtagttccagcgataacgctgcaagtcgatttgcccgcttccgcttaccatcacaccttctgccagtaatgcctgtcgctgacgctgtaaatccggtccggttaggctaattgtgccgtggcgattaaccacccggtgccagggtaaggtgctgccttcagggagacgctttaacacaccgcccacctggcgcgcggcgcgggggcttcccgccagtttcgccacatcaccgtaagtggtgacatagccttcgggaatagcggcgacgatttgccagacgcgttggggaaaactatcttctttttccatcttttcttcctgaggtaatttttcagcataatctggaaaaacgccgctgtgaagtcgcattgcgcaagaaaccagcatctggcacgcgatgggttgcaattagccggggcagcagtgataatgcgcctgcgcgttggttctcaacgctctcaatgggggctctgttggttctcccgcaacgctactctgtttaccaggtcaggtccggaaggaagcagccaaggcagatgacgcgtgtgccgggatgtagctggcagggcccccacccatttctgcctcccaccgtttcgtcaaaaaatcccaacatggctaaactttaaccacaactgacgtcgcaagaattgtctggctgcgcagtacgcttcggaggtatgtctgatgaagtatgttgatggttttgtggttgccgttcctgccgataaaaaggatgcctatcgggaaatggccgctaaggctgcgccattgtttaaagagtttggcgcgcttcgtattgtcgaatgctgggccagcgatgtaccggatggcaaagtgaccgattttcgtatggcggtgaaagcggaagagaatgaagaggttgtctttagctggattgaataccctagtaaagaggtccgcgacgctgctaatcaaaagatgatgagcgacccacggatgaaagagttcggcgagtccatgccgtttgacggcaagcgaatgatctatggcggattcgagagtatcatcgacgaataagtagcgtgacgggctgtgcggcgtgccgtcagcccaaaaattcacaaatgttgctcggcccagcgtaagaaatcttctttcggtaatgccttgctgtagagccagccctgaccgtagtgcacgccatgctggcgtaaccactcttcttgtttactggtttcgattccctccgctaccattttcagtttcagtgtttttgccatttcgatgatatgcggcgtgacatttttatattccagcgcatcaacgaaagatttatcgatcttcagaatgtcgacatccagatcctgtaaataacttaaactactataccccgtaccaaaatcatcaagataaatttcatggcccgcctcccggtagcgagaaattatcggggcgctggttttcggatcggcaaactcgcgttcagtgagttcaagcgcgatctgtctgggattaacctgatagtgattgatcatgtcacgcagcaattgcgggattttttcgctggtgagcacgggggattcaagattgatgctaatatgctgctgtggatgctgacgcagccagtcgcccatatcttcaaagacgcttcttataatcagtagcgtcaatggctcagaaaggcccgtttgctgtgccagcggaataaaactatctggactcaaccaactaccgtctgtctgcggccagcgcgccagtgcctcagcaccgacaattttgccattggctaaggagacaatcggctgatagtgcacgcaaatatcacgattttcgatagcatcctgcagccgatgatgcggactctgaatacggcgcaaaatacgcagcacaaacatcgctgccagcaggccaatcaccaacccgagcggtaaccaaataaagacttgccgatgccagcctttctgcaacattttcgtactagcccatgtgatgatgctaatattcatctccggtaagggcaggatatcgtaaatgattccattattttcgatatgctcaccgggtgttttttgtagcctggtaataattccctgagcaatttcatcgctgctggttatgacaacgttatgggcattgccaataatggcggcatcaatttgccaactgctatagggaatgacatcaataaaggaagcggggtcgatcatgacgacataatgtgccgttcccatggcgaccatgtaacggataatgcctaaatcgttatggcttgttaaccagacacgataaccatctttgctaattttacctggctcggggaaggtatcgggcggactttcatgctccagagagctacactggggaacgttgttatcgatataagccacttcctgaatatagcgataactgtaagatacccgacgcatttccatgagatgggcttcgctacaggcagcgccttgccatctttccagctcctgcagcgcatctttcccttgtgtcgccaccttattggctcgaatagcgacgcgggaggaataggtatccagctcttcaataaagcttgtttctacctgctgatgggccagccagatgcttaagccgacaggcagcaatacactaagaatcagtactccgctaataaggccgaccagatgtcgtgttctcaccagcatatccttattaacacagtgtagggaaagtatatctgattgtggaaaaaggctggctggagataaggaggtagagctggtatttcatgaagtgatgggtggaaacgatcattgtcatttgaccaggcgcagagctttacgcctggtatgtaaccctaacttaagatgtactttcggcgcgagcgagggtaaaaatatcgtaaaaagacagttcacctttacggacgatcattttttgcagttgttccttatgaacatccgcgacacgcggagagttcaagatggcttcaaccagcgcggcaggtacaaagcgcgtgttgtaccattcgccgttatagcaaacgcggaaatccagcacgtcgatatcttcatagcggtagcgtgggtagacatcgaaaaagaagaaaccattaagcaggataaataatacaaccagtagccagacagagccactcagcgtttcggactgcaacatcaccgccagggtggcaaaaaaagcaacgtacataccgataaacagccccggatgtttacggataaaactgatactaaagcggggtttgttgtcgcgtttttcgcgggtattcagagactcaatcgtttcggtcagcaggcgttgtatttcggtcatcgtttgccttcgtggtatctgcaactttccagggaacaccctattttaacgtgggaatagtagaggggaagtaacagatctaccacaattttgcataacagttgcgaaaaaccgattacaattttttaattattctggctggattaccgcccacgacaacgttgtccgggacatcttttgtgacaactgcaccactggctaccacgacgttatcaccaatggtcacaccagggttaatgaccgcgcgtccgccaatccagacgttattaccgatggtgacgggtttccccagttcagcaccgctattacgtgctacagggtcgatgggatgtgttgccgtgtagatatgaacgcctggtgccaacatacagttatcaccgatgcgaatagggcagacatcaagcatcacgcaatcgaagttggcgaaaaaattattaccgagaaaaatgttatagccatagtcacagcgaaacgttggctcaatataagcctctgtcacctgaccgaatagatcagcgagaatttgctggcgtaatgtgtgctcttccgccagggaatgattgtatcggtgaataagctgacgagcgcgcaggcgatcgcgagataacgtctcatctgcgctgcgatacaactcaccagcaatcatcttttctttttctgtgctcattactgacctccggttgctgaaaatgcggcaacacagtaagacgaaaagtcagtgaagagaacgttcccattacatctgtgtgataaagatcacatagggtatgtcttcatggcgaaaaagtataaaattcttaataaacagccggttatagctccgaaagcgaattatttattagcgaataaatttccatacactggaagggatcttgtcgtacagtttattcatggtcaattcggcgaggcggtgatctgcggcactgtaaaataccgccagttcattatcacttaattcgtatttatttttctcgataacacgctccagcgtgtcaattgtctggcaacgacgtaaacgcattaaataatcggttttcgttaaaggtttttcggacatacttctacctatggttgtaataattttaacaagataaactcgcaggattctctttcgtcgcattgacaaaacaacggaatagtcgattaccactcttccgccatttctgaagatcctgcatattaataccataactactgaacaacataaaggtgtcatccagatattcgtcgatctgctcaatgagcttattgtcttcattatacttaattttgtaattaagtgcgaaggtcgcaatatgctcaatcagttcattcaactggaggttgatcgcgctggttgggtcgtttacccagccatgattgctttcttcaaggtttgcaaggcagtcatgatacagggtttcacagagaaacttaagctgtgcgatatcatgtcttttgggactgtattcatccataacgcgtccccttcttagcggttgaactaacggacacctttcgggatggaaaaaacttactgacctggacttgccctctcgtttgttagcttaactataagccactctttgcaggttttcatcgcattattacgaaaaattacaattaggaaggaagcgggacaggactcactttttcatactagcactaacccgcagcaggtaaaagcagtttgctcgaactattcataacatttcaggattatcgccagatgaaattggtgacactaataccaggattgctctgaatatgacgtaataaccgaggaatgaataaagaattaccgcaaataattaagaatagcctctaaatgattatggattattaaatctattagcgctacttaatataaattaactaacaatcagtattttttatgaattttatccgtggttaatactggttttcgtatgagatcctgagttggtggttcaattactccttaatgttcgtaggttatgcataaaaaaggccgcttacgcggccttagtgattacacgttgtatcaatgatgatcgacagtatggctgtgctcgatatcttcattcttgcggctaaagcggcggcgaaccaccacaaagaataccggaacgaagaagattgccagtaccgttgcggtcaccatcccgcccattacaccggtacctactgcgttctgcgcgccggaaccagcaccagtactgataaccagcggcataacgccgaggataaacgccaggctggtcatcaggatcggacgtaaacgcatccgcaccgcatcaagcgtcgcttcaatcagacctttaccttctttatccatcaagtctttggcgaattcgacgataaggatcgcgttcttcgcgctcaacccaatggttgtgagcaggcctacctggaagtaaacgtcattggtcaggccacggaaggtggcagccagcaacgcaccgataacccccagcggaacgaccagcataacggagaacggaatgctccagctctcgtacagcgccgccagacacaggaacacgacaatcaagctaatcgcgtacagactaggtgcctggttgccggagagacgttcctgataggacatccccgtccagtcatagccaacaccggtaggcagtttgctcgccagttgttccatcagctccattgcttcaccggtacttttacccggtgccgcctggcctaagatttccatggatggcaggccgttgtaacgttccagacgcgggctaccgtactcccaacgagaagaggagaacgcgctgaatggcaccatctgaccatcagcagcacgaacataccagtcgccgatatcatccggcagcatacggtatttcgcttcactcatgacataaactttcttcacacgaccgcggtcgataaagtcgttcacatagctgccgccccatgcagcgcccagagtggtgttaatgtcgttgatagaaacacccagcgcctgcgctttttcctggtcgatatcaatcttaaactgcggggtatcttccagaccgtttggacgtacgctggtcaacatatcagggtgcttcgctgcttctgcaagcaactggttacgcgcctgagtcagtttttcgtgaccaaggccagcctggtcaatcagctcaaagtcaaagccggttgcagtacccagttccacgattgcgggcaggttaaaggcgaaaaccatcgcatctttgatttggctgaaagcgcgtgttgcacgcatggtaatcgcttcaactttgttttcttcgcccggacgatcggcccagtccttcaaggaaacgaacgcaataccggtattctgaccacgtcccgcaaagccgaagccgttaacggcgaacacgctctcaacgttgttcttttctttggtcagatagtaatgcgttacctcattgagcactttctgtgtacgttcctgcgttgcacctgctggcagctgaaccatggtcataaacacgccctggtcctcatctggcaagaaggagcttggcagacgcacgaacagataggccatgccgaccacgatgatcagatacagcaccaggtaacgccccgtactgcgcagaataccgcctacgctgtcggtgtagtggtgcgtgctcttctcgaacatgcggttaaaccagccgaagaagccttttttaccttccccgtgatcgcctttggcaatcggtttcagcatggtggcacaaagagctggagtcaggatcaacgccaccagtacgctcagcgccattgcactaacaatggtaatagagaactgacgatagatagcaccagtagaaccgccaaagaaggccatcggtacgaataccgcgctcagtaccatcgcgataccgaccagagcgccctgaatctgccccatgctcttacgggtagcttcttttggcggcaaaccttcttccgccataacacgctcaacgttttctaccacaacgatggcgtcatccaccaacaggccgatggcgagcaccatcccgaacattgttagcgtgtttatgctgaagccaaaggcggcaaggacggcaaaggtcccgagcaataccaccggtacggcaatggtcggaatcaacgtcgcgcggaagttctgcaggaacagatacataaccaggaacacgaggatgatcgcttcgaccagcgttttaaccacttcgtgaatagagattttcacgaacggcgtggtgtcgtatgggtaaacaattttcagaccgctcgggaagaacggttccatcttcgccagttcagcacggattgccgcagcggtatccagcgcgtttgcaccggtcgccagcttgatccccagaccggaagccggttggccgttaaactctgcgatgatgtcgtagttctcaccacccagctcaatcttcgcgacgtcacgcagcagcacgcgggaaccatcctgattcactttcagcaggattttgccgaactcttcagtagaggtcagacgcgtctgagcaataatagaggcgttaagctgttggcctttcaccggcggcgtaccaccgagctgacccgccgcaacctgggcgttctgcgctttgatggcggtaatgacatcaaccggcgttagctggaatttgttcagctcattcgggttcatccagatacgcatcgcgtactgactaccgaacaactgaacatcacccacgccgctcgtacggctgatggcatctttcatattcgccgccacgtagtcggagatatcctcctgcgtcatggtgccatcggtgttgataacgccgacaaccatcaggaagctgctggaacttttctcaacgctcaccccttgctgctgaacttcttgcggcagcaacggcatcgccagctgcagtttgttctgcacctgaacctgcgcgatatccgcatcagtaccagactcaaaggtcagggtgatctgcacggtacccgtggagtcactgttagaggacatgtacatcaggttatcgataccgttcatattctgttcgataacctgtgtcaccgtgtcctgcactgttttcgcatcagcgccggggtaggaggcggagatcgttactgccggcggtgcaatcgtaggatattgcgccaccggcagtttgaggatcgccagcccccctgccaacatgatgataatggcgatcacccacgcaaaaatcgggcgatcgataaagaaattaggcatgtcttaacggctcctgtttaagttaagacttggactgttcaggctgagcaccgcttgcggcttgctggttattatcagcggtaacttcttgtgcttttacctggacaccaggacgcactttctgcagcccacttattactacgcgatcgcctgctttcagaccttctgtcaccagccacttatcgccaatagcctggcttgcaacgatcggacgggtttccactttgtcatccgcgccaactaccagtacggtggcatcgccacgcggcgtacgggttacgccctgttgcgggactaaaatagcgtttggattaagcccttcttccagacgtgcgcgcacgaacatacccggcagcagagtgtgatccgggttcgggaagatagcgcgtagggtgatagacccagtggtctgatcaacggtaacgtcagagaattccagcgtaccgtcctgcgggaacttaatgccgtcactggtgatcagactcactttggctttgccgttctcttgtttcagcgtgccattcgccagttcctgtttcaggcgcaggaagtcgttgctggactgggtcacatcaacgtagatcggatcaagttgctgcacggttgccagcgcagtcgcctgaccgttctgtaccaatgcgccttccgtcacgttgctcttaccaatgcgaccgctaatcggagaggtgactttggtgtaagccagattgatccgcgcagtttcaacggcagctttcgccgcagttaccgcagcattcgcctgttgcgcatcagccagagcctgatcgtactcttgcttactgatgtactgagtaccgagcagtttctgataacgattcaccgtcaattgcgcgatattggctgcagcctgggctttcgccagatcacctttcgcactgtcgtatgtcgcctgataggtcgcaggatcaatctgatagagagagacacctgcttcgatgtcgctaccttctttgaaattacgcttcaggataatcccgctaacttgaggacgaacttctgcgatccggtaggcactggtgcgacccggaagctcggttgtgatctgcagaggttcagttttgactgttactacgccaacggcgggcatctgctggccaccttgttgggcctgtttgtcgtcacatcctgttagggctaagctgccactgagcatcagaacgaccgccagaggcgtaaaccctctgtttttgttcatatgtaaacctcgagtgtccgatttcaaattggtcaatggtcaaaagttaataaacccattgctgcgtttatattatcgtcgtgctatggtacatacattcacaaatgtatgtaaatctaacgcctgtaaattcacgaacatatggcacgaaaaaccaaacaagaagcgcaagaaacgcgccaacacatcctcgatgtggctctacgtcttttcagtcagcagggggtaagttccaccagcctgggcgagattgcaaaagcagctggcgttacgcgcggtgcaatctactggcattttaaagacaagagcgatttgttcagtgagatctgggaactgagtgaatccaatattggtgaactagagcttgagtatcaggcaaaattccctggcgatccactcagtgtattaagagagatattaattcatgttcttgaatccacggtgacagaagaacggcgtcgattattgatggagattatattccacaaatgcgaatttgtcggagaaatggctgttgtgcaacaggcacaacgtaatctctgtctggaaagttatgaccgtatagaacaaacgttaaaacattgtattgaagcgaaaatgttgcctgcggatttaatgacgcgtcgcgcagcaattattatgcgcggctatatttccggcctgatggaaaactggctctttgccccgcaatcttttgatcttaaaaaagaagcccgcgattacgttgccatcttactggagatgtatctcctgtgccccacgcttcgtaatcctgccactaacgaataaccctgaatctgactccaggatttttcctggacattttcgtcgttgctattctggttcactgcgtcgtgatattcttgcggtttgactttttcaggtcgttcttcaggttcagaaaccttcattcatcatgactatgttccagtattacaaacgaagtcggcattttgtttttagtgcatttattgcttttgtttttgtcttgttatgccagaacacggcgtttgcgcgggcgagtagcaatggtgatctgccgacaaaagcggacctgcaggcgcaacttgacagtctaaataaacaaaaagatctttctgctcaggacaaactggtgcagcaggatctgacagatacattagccaccctcgataaaatcgatcgcataaaagaagagacagttcagctacggcaaaaagtcgctgaagcgccggaaaaaatgcgccaggcgaccgcggcgttaacagcacttagcgatgtcgataacgacgaagaaacgcgcaaaattctgagcacgctgagcttgcgccagctggaaactcgcgttgcccaggcgctggacgatttgcaaaacgcacaaaacgatctggcgtcttataacagccagctggttagcttacagacgcagcccgaacgcgtgcaaaatgcgatgtataacgctagccagcagctgcaacaaattcgcagtcgtctggatgggactgatgtcggcgagacagccttacgtcccagccagaaagtgttaatgcaggcccagcaggcgttgctgaatgcggagattgaccagcagcgtaaaagcctggaagggaacaccgtcttgcaggataccttgcaaaagcaacgtgattacgtgacggcgaacagcgctcgtctggagcaccagttacaactgttgcaagaagcggtaaacagcaagcgcctgactttaaccgaaaaaacggcgcaggaagccgtctccccggatgaagccgcgcgtattcaggctaatccgctggtgaagcaggaactggaaattaaccagcagttaagtcagcgtctgattaccgcgactgaaaacggtaatcagttgatgcagcaaaacattaaagtcaaaaactggctggagcgggcgctgcaaagcgaacgcaatattaaagagcagattgccgtcctgaagggcagcctgctgttgtctcgtatcctttaccagcaacaacaaacgctgcccagcgcggatgaactggaaaacatgaccaaccgcatcgcggatttgcgtctcgaacagtttgaagttaaccagcagcgtgatgcactcttccagagcgatgcgttcgtcaacaaactggaagaaggtcacaccaacgaagtcaacagcgaagttcacgatgcgttattgcaagtggttgatatgcgtcgcgaattgctggatcaactcaacaaacagttgggtaaccagctgatgatggccattaacctgcaaatcaaccagcagcagttaatgagtgtgagcaaaaacctgaaatccatcctgactcagcaaatcttttgggtgaacagtaaccgtccaatggactgggactggatcaaagcgttcccgcaaagcctgaaagatgaatttaagagcatgaaaatcacggtgaactggcaaaaagcctggcccgccgtttttatcgctttcctcgctggtttgccgctgctgttgattgccgggctgatccactggcgtctgggctggctgaaagcgtatcaacaaaaactggcttccgctgtgggttccctgcgtaacgacagccagctcaacacaccaaaagcgatccttatcgacctgatccgtgcgctgccggtgtgcctgattattctcgcggttggcctgattctgttgaccatgcagctcaacatcagcgaactgctatggagcttcagcaaaaaactggcgatattctggctggtgtttggcctgtgctggaaggtactggagaaaaacggcgttgccgtacgtcacttcggcatgccggaacagcagaccagccactggcgtcggcaaattgtccgcatcagtctcgcattgctgcctatccatttctggtctgtggtggcagaactttccccgctgcatctgatggatgatgtgctggggcaagcgatgattttcttcaacctgctgctgattgccttcctggtatggccgatgtgccgcgaaagctggcgtgataaagagagccacaccatgcgactggtcaccattaccgtgctgagcataatcccgattgcgctgatggtgctgactgctacaggctacttctacactacgctgcgtctggcaggacgctggattgaaaccgtttatctggtgatcatctggaacctgctgtaccagacggtactgcgtggcttaagcgtagcggcgcggcgtatcgcctggcgtcgtgcgctggcgcgtcggcagaatctggtgaaagagggcgcagaaggtgctgaaccgccggaagaacccaccattgcactggagcaagttaaccagcagacgctgcgtattaccatgttgctgatgtttgcgctgttcggtgtcatgttctgggcaatttggtccgatttgatcaccgtgttcagctatctcgacagcatcacgctctggcattacaacggcactgaagctggcgctgcggtggtgaaaaacgtcaccatgggcagtctgttgtttgcgattatcgccagtatggtggcctgggcgttgattcgcaacctgcctggtttactggaagtgctggtgctcagccgactgaatatgcgccagggcgcgagctatgccattactaccatccttaactacatcattattgctgttggtgcgatgacggtgttcggaagcctgggcgtctcttgggataaactccagtggctggccgcagcattatccgtaggtcttggttttggtttacaagaaattttcggtaacttcgtctccggtttgatcattctattcgaacgtccggtgcgtattggcgatacggtaaccattggtagcttcagcgggacggtaagtaagatccgtattcgtgcgacaacgattaccgatttcgatcgcaaagaagtgatcatcccgaacaaagcgtttgttaccgagcgtctgatcaactggagcttgactgacactactacgcgtctggtgatccgtctcggcgtggcctatggctccgatctggaaaaagtgcgtaaagtgttactgaaggcggcgactgagcacccaagggtgatgcacgaaccaatgccggaagtcttctttacggcatttggtgccagcacgttggatcatgagctgcgtctgtatgtgcgtgaactgcgtgaccgtagtcgtactgtcgatgagctgaaccgtactatcgatcagctgtgccgtgaaaacgacatcaacattgcctttaaccagcttgaagtgcatctgcacaacgagaagggcgatgaggtgacggaagtaaaacgcgactacaaaggcgatgacccgacgccagcggtagggtaaaaacgaaagggggcaacatttagttgccccgagattgctaacaaagtgcgcgttgttcatgccggatgcggcgtgaccgccttatccggcctacgaaaccgcaagaattcaatatattgcaggagcggtgtaggcctgataagcgtagcgcatcaggcagttttgcgtttgcccgcaaccttaggggacatttagcgaccccatttatttctcacttttccgcctcatcatcgcgcgttaatttcttttcataatcacgctttacaatatccagcgcgcgcagcacggtactggcagggatctgattttcctccagcagcacaatcaaatcgacagccagtttgacatcgtcaggggcattttccagactcatattctctccattgttagcgggttaaacgcgctaacctgttttcgattttttccagcgcatggcggcagcgtgccaggcgcgcttcataggcttccacttcacgatgcagcgtttgctgttccacgagatcggtcacccgcgccagacgggctctgcgttcggcaaccatctcacgtagccgccgctcaaaatcctgatgctgaatacgtttacgctgccagcgggcaattttcggtggtgcactgtcccactcgcgcaaactccaggcggaggcttcacgcgcgatggcttccagttgtgccgccagatgttccgccagccaggccacttgcggcagctgttgctgctcaactgcatgacgaagcgcagccagattatcgcccgcctcgtcgagacaagcctgtagtgttgtcgcacgagtctgaaaaagatgcctgtcgaaacgagcacttagcgtggcgaactgactcaccggggcacaacgctgacgcagcgtagcgagctgtccttccagtttttccagcagcagggcggttttcacgataagacctcaatgaaaatgataattgttatgctaaagtagccactctgtaagctgacaacactcaatatgcaacgaatcattttaatcatcattggctggctggcggtagtgctgggtacgctgggcgtggtattaccggtattaccgacgacgccgtttatcctgctggcggcctggtgctttgcccgttcttccccgcgctttcacgcctggttgctgtaccgcagttggtttggcagctatctacgtttctggcagaaacatcatgcgatgccgcgcggcgtcaaaccgcgggcgattttgcttattttgctcacgtttgccatttctctgtggttcgtccagatgccatgggtgcgcatcatgttgctggtaattctcgcctgtttgcttttctatatgtggcgaattccggtgattgatgaaaagcaagaaaagcactgaagcacaacaatcgcagttgcaattattgcgtacagccagtacattctggcgttttcgagcacaggcgcaggcggtcaaaggttaaacaactgttacttttgatacgtttaaaacgcgccgtgagtaccaccgtaacaagcaggcatacacttatgaccgcgactgcacagcagcttgagtatctcaaaaatagcatcaaaagcattcaggactacccaaaacccggcattcttttccgcgatgtcaccagcttactggaagacccgaaagcttacgctctcagcatcgacttgctggttgagcgttacaaaaatgcgggcattaccaaagttgtcggcaccgaagcgcgtggcttcttgtttggcgctccggtagctctgggtctgggcgttggctttgtaccggtccgtaaaccgggcaaactgccgcgtgaaaccatcagtgaaacttacgacctggaatacggcaccgatcagctggagatccacgttgatgccatcaaaccgggcgacaaagttctggtggtggacgacctgctggcaaccggcggcactatcgaagcgaccgttaaactgatccgtcgtctgggtggtgaagtggctgacgctgcgttcattatcaacctgttcgatctcggcggcgaacagcgtctcgaaaaacagggcattaccagctacagccttgtcccgttcccgggccattaattatcgccagtcttgtgctgcccacgctacggacagcacaagatgtgcattcagcctcgccgttctgacggggctgtgttagcattaccccttcgtgaatccaccttccagcgtttcagagcctgccaatgagttatcaggtcttagcccgaaaatggcgcccacaaacctttgctgacgtcgtcggccaggaacatgtgctgaccgcactggcgaacggcttgagcttagggcgtattcatcatgcttatcttttttccggcacccgtggcgtcggaaaaacctctatcgcccgactgctggcgaaggggctaaactgcgaaaccggcattaccgcgacgccgtgcggcgtgtgcgataactgtcgtgaaatcgagcaggggcgctttgtcgatctgattgaaatcgacgccgccagccgcaccaaagttgaagatacccgcgacctgctggataacgtccagtacgctccggcgcgtggtcgtttcaaagtttatctgatcgacgaagtgcatatgctgagccgccacagctttaacgcactgttaaaaacccttgaagagccgccggagcacgttaagtttctgctggcgacgaccgatccacagaaattgccggtgacgattttgagtcgctgtctgcaatttcatctcaaggcgctggatgtcgagcaaattcgccatcagcttgagcacatcctcaacgaagaacatatcgctcacgagccgcgggcgctgcaattgctggcacgcgccgctgaaggcagcctgcgagatgccttaagtctgaccgaccaggcgattgccagcggtgacggccaggttagtacccaggcggtcagtgcgatgctgggtacgcttgacgacgatcaggcgctgagcctggttgaagcgatggtcgaggccaacggcgagcgcgtaatggcgctgattaatgaagccgctgcccgtggtatcgagtgggaagcgttgctggtggaaatgctcggcctgttgcatcgtattgcgatggtacaacttagccctgctgcacttggcaacgacatggccgccatcgagctgcggatgcgtgaactggcgcgcaccataccgccgacggatattcagctttactatcagacgctgttgattggtcgcaaagaattaccgtatgcgccggaccgtcgcatgggcgttgagatgacgctgctgcgcgcgctggcattccatccgcgtatgccgctgcctgagccagaagtgccacgacagtcctttgcacccgtcgcgccaacggcagtaatgacgccaacccaggtgccgccgcaaccgcaaagtgcgccgcagcaggcaccgactgtaccgctcccggaaaccaccagccaggtgctggcggcgcgccagcagttgcagcgcgtgcagggagcaaccaaagcaaaaaagagtgaaccggcagccgctacccgcgcgcggccggtgaataacgctgcgctggaaagactggctagcgtcaccgatcgcgttcaggcgcgtccggtgccaagcgcgctggaaaaagcgccagccaaaaaagaagcgtatcgctggaaggcgaccactccggtgatgcagcaaaaagaagtggtcgccacgccgaaggcgctgaaaaaagcgctggaacatgaaaaaacgccggaactggcggcgaagctagcggcagaagccattgagcgcgacccgtgggcggcacaggtgagccaacttagcctaccaaaactggtcgaacaggtggcgttaaatgcctggaaagaggagagcgacaacgcagtatgtctgcatttgcgctcctctcagcggcatttgaacaaccgcggtgcacagcaaaaactggctgaagcgttgagcatgttaaaaggtagtacggttgaactgactatcgttgaagatgataatcccgcggtgcgtacgccgctggagtggcgtcaggcgatatacgaagaaaaacttgcgcaggcgcgcgagtccattattgcggataataatattcagaccctgcgtcggttcttcgatgcggagctggatgaagaaagtatccgccccatttgatcgtaagcacagcttacgttcgtcatccttaacgtgattgagagagaaacctatgtttggtaaaggcggtctgggtaacctgatgaagcaagcccagcagatgcaagaaaaaatgcagaaaatgcaggaagagatcgcgcagctggaagtcaccggcgaatctggcgcaggtctggtaaaagtgaccatcaacggtgcacacaactgccgtcgcgtagagatcgacccgagcctgctggaagacgacaaagagatgctggaagacctggtggctgcagcattcaacgacgcagcacgtcgtattgaagaaacgcagaaagaaaaaatggcctctgtatcctccggaatgcagctgccgcctggctttaagatgccgttctgatgcaaaccagcccgctgttaacacagcttatggaagcactgcgctgtctgccgggcgttggcccgaagagcgcgcagcgtatggcgttcacgctgcttcagcgcgatcgtagcggcgggatgcgtctggcgcaggcgctcacccgggcgatgagcgaaatcggccactgcgccgattgccgcactttcaccgaacaggaagtctgtaacatctgtagcaatccgcgtcgtcaggaaaacggtcaaatctgcgtggtggagagtccggcggacatctacgccattgagcagacggggcagtttagtggtcgttattttgtgttgatggggcatctgagtccgctggacggcatcggtccggatgatatcgggcttgatcgtctggaacagcgtctggcagaggaaaaaatcactgaagtgatcctcgccaccaaccccacggttgaaggtgaagctaccgctaactacattgccgagctttgcgcgcaatatgacgtggaagccagccgaatcgctcatggcgttccggttggcggcgagctggaaatggtcgacggcaccacgttgagtcactcccttgccgggcgtcataagattcgtttttaagcaaacgagagcaggatcacctgctctcgcttgaaattattctcccttgtccccatctctcccacatcctgtttttaaccttaaaatggcattattgaggtagacctacatgaaaggacaagaaactcgtggttttcagagtgaagtgaaacagcttctgcacctgatgatccattctctctattccaataaagaaatcttcctgcgtgagcttatctctaacgcctccgatgcggcggacaagctgcgtttccgtgcgctctctaacccggacctgtacgaaggtgatggcgaactacgcgttcgtgtctctttcgataaagacaagcgtacgctgaccatctccgataacggcgtggggatgacccgcgacgaagtgattgaccatctggggactatcgctaaatccggtaccaaaagtttcctcgaatccctgggttctgaccaggcgaaagacagccagctgatcggtcagtttggtgttggtttctactctgcgtttatcgtggccgacaaagtgaccgtgcgtactcgcgcggcaggcgaaaaaccagaaaatggcgtcttctgggaaagcgctggcgaaggtgaatacaccgttgccgacatcaccaaagaagatcgtggtactgaaatcaccctgcatctgcgtgaaggcgaagacgagttcctcgatgactggcgcgtgcgttccatcatcagcaaatactccgaccatatcgcgctgccggtagagatcgaaaaacgcgaagagaaagacggcgaaaccgttatctcctgggagaaaatcaacaaagcgcaggcgctgtggactcgtaacaagagcgaaatcaccgatgaagagtacaaagagttctacaaacacatcgcccacgactttaatgatccgctgacctggagccacaaccgtgttgaaggtaagcaggagtacaccagcctgctgtacatcccgtcccaggctccgtgggatatgtggaaccgcgatcataaacacggcctgaaactgtatgttcagcgtgtgttcatcatggacgacgcagaacagttcatgccgaactatctgcgcttcgtgcgtggtctgattgactccagcgatctgccgctgaacgtttcccgtgaaatcctccaggacagcacggtaacgcgtaacctgcgcaatgcgctgaccaagcgtgtgctgcaaatgctggaaaaactggcgaaagacgacgcggaaaaataccagaccttctggcaacagtttggcctggtactgaaagaaggtccggcggaagatttcgctaaccaggaagcgatcgccaaactgctgcgttttgcttctacccataccgattcttctgcgcagaccgtatctctggaagactacgtttcccgcatgaaagaagggcaggagaaaatctactacatcaccgcagacagctatgcggcagcgaagagcagcccgcacctggaactgctgcgtaagaaaggcatcgaagttctgctgctttccgaccgcatcgatgagtggatgatgaactatctgactgagttcgacggtaaaccgttccagagcgtgtctaaagttgacgagagccttgaaaaactggctgacgaagttgatgagagcgcgaaagaagcggagaaagcactgactccgttcatcgaccgtgtgaaagccctgctcggcgagcgcgtgaaagatgtccgtctgactcaccgtctgaccgatacgccagcgatcgttagcaccgacgcggacgaaatgagcactcagatggcgaaactgttcgctgcggcgggccagaaagtgccagaagtgaaatacatcttcgaactgaacccggatcacgtactggtgaaacgtgcggcagatactgaagatgaagcgaagttcagcgagtgggtagaactgctgctggatcaggcgctgctggcagaacgcggcacgctggaagatccgaacctgtttattcgtcgtatgaaccagctgctggtttcctgatgtaatgccggatgaccttcgtgtcatccggcatttttcttttcatcatctgcactttccgcaaattatctcgccattaaccgtttcagccccaggtgcctttcttgaggcaatcgcctgttggtggtatcgtttatcgctttttcaaaaaattcgacacattttaaggggattttcgcaatgcgtatcattctgcttggcgctccgggcgcggggaaagggactcaggctcagttcatcatggagaaatatggtattccgcaaatctccactggcgatatgctgcgtgctgcggtcaaatctggctccgagctgggtaaacaagcaaaagacattatggatgctggcaaactggtcaccgacgaactggtgatcgcgctggttaaagagcgcattgctcaggaagactgccgtaatggtttcctgttggacggcttcccgcgtaccattccgcaggcagacgcgatgaaagaagcgggcatcaatgttgattacgttctggaattcgacgtaccggacgaactgatcgttgaccgtatcgtcggtcgccgcgttcatgcgccgtctggtcgtgtttatcacgttaaattcaatccgccgaaagtagaaggcaaagacgacgttaccggtgaagaactgactacccgtaaagatgatcaggaagagaccgtacgtaaacgtctggttgaataccatcagatgacagcaccgctgatcggctactactccaaagaagcagaagcgggtaataccaaatacgcgaaagttgacggcaccaagccggttgctgaagttcgcgctgatctggaaaaaatcctcggctaattcgaaagcgcgcacggacagtcccctcgccccctcggggagagggttagggtgaggggaacaggcccgcacaagcaaacttatcagcaatctcaggccggatattcattcggccttttacaaaaacctcaatctgcgctattcctttttctgatttgacctctcacagcaattagttcttcttcctcacttttccgctacaattatcaacaagttgaatcgataagaggcggtaatgcgtcagactaaaaccggtatcctgctggcaaacctgggtacgcccgatgcccccacacctgaagcggtaaaacgctatctgaaacaatttttaagcgacagacgcgtggttgataccagtcggttgttatggtggccattgctgcgcggcgtgattttgccgctgcgcagcccgcgtgtggcgaagctgtatgcctctgtctggatggaaggtggcagcccgctgatggtttacagccgccagcaacagcaggcgctggcacaacgtttaccggagatgcccgtagcgctgggaatgagctacggcagcccaagtctggaaagcgccgtagatgaactcctggcagagcatgtagatcatattgtggtgctgccgctttatccgcaattctcctgttctacggtcggtgcggtatgggatgaactggcacgcattctggcgcgcaaacgtagcattccggggataagctttatacgtgattacgccgataaccacgattacattaatgcactggcgaacagcgtacgcgcttcttttgccaaacatggcgaaccggatctgctactgctctcttatcatggcattccccagcgttatgcagatgaaggcgatgattacccgcaacgttgccgcacaacgactcgtgaactggcttccgcattggggatggcaccggaaaaagtgatgatgacctttcagagccgctttggtcgggaaccctggctgatgccttataccgacgaaacgctgaaaatgctcggagaaaaaggcgtaggtcatattcaggtgatgtgcccgggctttgctgcggattgtctggagacgctggaagagattgccgagcaaaaccgtgaggtcttcctcggtgccggcgggaaaaaatatgaatatattccggcgcttaatgccacgccggaacatatcgaaatgatggctaatcttgttgccgcgtatcgttaaagctgagcggtaaagaactgagcgccgtcgcgaagagcctcgtcggcggttttcatcatccgactataatgcaaaaaggcgtgcagcgtgcctgggtagagtttgaactcacagggctgctgatgcgccgctaacgtctggtaaagcagacggctgtcatccagcagcggatcgaactccgccccggcaataaaacagggcggaacttcgcgagtgagatcattattaaacagacagtaatacgggctctcgcggtccgcgtcgttgcttaaatatgcctcttcgtacatctgcaaatcctgttgcgttaagccatcccagacaccgcccaacagacgacgagtcacggaatcccgtaatccgtaaagcccataccacagcaaaacgcccgcaactttaccgcaatcgatctgtttatcacgcaaccacaacgcactggcgagcgccagcatggcacctgcggaatcaccggcaaagccaatgcgggacatattgatttgataatcctccgcctgctggtggaaataacaacaagcagccacaatttcctctatcgcttgcggaaaacgcgcttcaggactaagggtgtaatcaataccaatcaccgtacattggctgtagcttgccagcaggcgcatgatgcgatcgtgggtatcgagattgccgagaataaaaccgcctccatgcaaataaaatagcgtcgctgggctatctggctgcggacaaaagagacgtgtttccacctgcccatattttgttggaaccatgtaagctctggttgccatttctggagcgcccgcattccagaatcggcgctcaagcgtgtaatactgtcgttgctcagcaatcgttcccgttgcgggccagggcggtaaatccggctgaagagtattcacaacggtcttcatttcagcagaaataaggtccagaacaggtagtttgttttccggcttcatacaaaaactcctttcaaattacgtcattgtaaggaaccactgccatgaaaatgcgatcccgcctgctgatattgaaactggctgcgtctcgcgcgctcccgtcagattgtgttaacattcgccgctcagttaaccacccgtaaaaacaaccatgaaatttcccggtaaacgtaaatccaaacattacttccccgtaaacgcacgcgatccgctgcttcagcaattccagccagaaaacgaaaccagcgctgcctgggtagtgggtatcgatcaaacgctggtcgatattgaagcgaaagtggatgatgaatttattgagcgttatggattaagcgccgggcatagtctggtgattgaggatgatgtagccgaagcgctttatcaggaactaaaacagaaaaacctgattacccatcagtttgcgggtggcaccattggtaacaccatgcacaactacagcgtgctcgcggacgaccgtagcgtgctgctgggcgtcatgtgcagcaatattgaaattggcagttatgcctatcgttacctgtgtaacacttccagccgtaccgatcttaactatctacaaggcgtggatggcccgattggtcgttgctttacgctgattggcgagtccggggaacgtacctttgctatcagtccaggccacatgaaccagctgcgggctgaaagcattccggaagatgtgattgccggagccagcgcactggttctcaccagttatctggtgcgttgcaagccgggtgaacccatgccggaagcaaccatgaaagccattgagtacgcgaagaaatataacgtaccggtggtgctgacgctgggcaccaagtttgtcattgccgagaatccgcagtggtggcagcaattcctcaaagatcacgtctctatccttgcgatgaacgaagatgaagccgaagcgttgaccggagaaagcgatccgttgttggcatctgacaaggcgctggactgggtagatctggtgctgtgcaccgccgggccaatcggcttgtatatggcgggctttaccgaagacgaagcgaaacgtaaaacccagcatccgctgctgccgggcgctatagcggaattcaaccagtatgagtttagccgcgccatgcgccacaaggattgccagaatccgctgcgtgtatatagccacattgcgccgtacatgggcgggccggaaaaaatcatgaacactaatggagcgggggatggcgcattggcagcgttgctgcatgacattaccgccaacagctaccatcgtagcaacgtaccaaactccagcaaacataaattcacctggttaacttatagtagcttagcgcaggtgtgtaaatatgctaaccgtgtgagctatcaggtactgaaccagcatagtcctcgtttaacgcgcggcttgccggagcgtgaagacagcctggaagagtcttactgggatcgttaagttatcgtcggttcgtaggccagataaggcgttcacgccgcatctggcatttggctctcgatgcctgatgcgacgctggcgcgtcttatcatgcctacatatttttcatattttacatccggcaaccaccgtttaccccgtcaccacctcacccgccggtggcgtttccagcagttccagcatggtacgggcgatttcacgctcgcccatcactacctgattcgcaccacgttcggtgatatacgccacttcatcgtcataatgggcgcgggcaataatctcaatatccggatttttcgcgcgggcagatgccacaatctcacccgcttcataaccgttgggaatcgtcaggatcagccattttgcacattccagatgcgccagttgcataatttcttcgttcgccgcattgcccaatactgcgcggaccccgcgctctcgcagctcatcaacacgggttcgactcgtctcaatcaccaccagcggaatatcagaggcgagcaatttctcccccagcaggctgcctacacgaccgtaacccaccagtagcgcatggttgcaaatatccactgggatctgcttctcttcttcgattgcctcttccagcgtctgctcttccagcgtttcggtcttcgccagatatttctccagtagtgcgaacagtaccgggttgagcataatgctcaggatcgcccctgccagtaccaggttttgtccggcctgcggcagtaaattcaatgccattcccagtcccgccaggataaacgcgaactcaccaatctgcgccaggctggcggcgatggttaatgccgtacgttgggagtgaccaaacagtcgcaccaggaaaaatgcggctaagctcttaccaaacagaataatcgccagcgtcgccagcactgccagcggttgctgaatcagaattaacggatcaaacaacatcccgacggagacaaaaaacagcaccgcaaacgcgtcgcgcaatggcagcgtatcgtgggcggcacggtgactcagttcagactcgttcagtaccatcccggcaaagaacgcaccgagtgcaaaggagacatcaaacagctctaccgcaccaaaggcaacccctaacgccagcgccagcacgctcagggtaaacagctcgcgagaaccggttgccgcgctgcgtgccataatccacggcaccagacggcgacctaccagcatcataatggcgataaatgcgatcactttgccgatggtgatccccatatcgactgcaagagtggcaaagcccacatcgccctgttccatcattcctgccactgcgggcagcaacaccagcgtcagaaccattaccaggtcttccacaatcaaccaaccgatggcgatttgcccacgctgactgtcaattaattgccgttcttcaagtgcgcgcagtaacaccacggtactggcggtggaaagacataaaccgaacacgataccggtcattaagctccagcccagcacggcagagagcgccatacccagcagcgtcgccacggctatctgggcgatcgcaccgggaatggcgatggcctttaccgccatcaaatccttcaggctaaagtgcaaaccgacgccaaacatcaacagaatgacgcccagttcagccagttccggggcaagcttggtatcggcaacaaagcccggagtgaatggtcctgccagcacacccgctaacagatatcccaccagaggagaaatacgtagtttattggccagcatgccgaggataaaggcgagcacaaggccgccaacaatggtggtgataagcggggtggcgtgatgcattccgtctccttttcctggtggttattgtccatttttggccgggaaaaccaaaattacaggtaatagtttatgacaatttcattgatgatgttcatgaataattattgaattttgcagaaaaatggaattagctgcaaaaaaagcacggatcggaaaacagaaggcggtttaacagaggaaaggcttatggcgactgtaaaacgatgcagccaaagtttgcctttggctgcaatgaaatcagtctttatgccggttatcaggcaggaatatggtcaacatccccaatagtggcaggaaagcacagattttatagactaactcgatgctggtgtgatcggcgataagccccagaactgccgctcccagacctcccatgccaaaagcaaaaccgaaaaagagtccagaaaccataccgatacgtcctggaagcagctcctgagcgtagaccagaatggcagagaatgcgctagcgaggataaatccaataatcaccgttaaaacccccgtccagtgcaggctggcgtagggtaaaatcagcgtaaacggcgcaacgccgaggatagagccccaaatcacatatttccgcccaattttatcccctacaggcccgccgatcaccgtacctgccgcaacggcaaacaggaaggcaaacagatgaagctgagcattctggatagataatccgaatttttgcatcagataaaaggtgtaatagctgctgatgctcgccatatagaaatatttgctgaaaatgaggattaacagaatgctgaccgccagtacaactttattgcgcggcagtggattgataatcgtcgctttgggttttcctttattcattcggtgctgtgcgctgtaccaacggctgatttgcgccaacaccacgatcgccagcagtgccgcaagcacaaaccaggcaacgttgcctttgccataaggcgcgataatcaccgccgccagcaagggtcccagggaactgccaaagttgccgccgacctgaaagatagattgcgccaggccatgccgcccgccggaagccatacgggccacgcgagaagattccggatgaaagacgctactaccggtaccgaccagcgccgccgccagcagaactgcgccaaaactgcccgccagcgcaagcagcaccagaccgcttaaggtaaagcacatgccaattggcaagctccatggcatcggatatttatcggtccagtagccgaccactggttgcagtaggctagaggcgagctggaaggtgagggttatcatgccaatctgcataaatgtcagagaaaattcactctgaagcagcggataaatcgccagaatcaggctttggatcatgtcgttcagcagatgactgaggctgatagcacctaaaataccaaagcttgttcgggccttggtcgtactcgcagccgcgcccgccacaggctggggttgttcactcattgccataggaaagtcactttttcagggttgcgatgtaaagaatgatcttatttgtgattattaccagactaacatacctgtatgcgtcgtctgaaggaagtctcaacgccgaatacagaatttctaatctggatgcagatttatcttcaccggacgcagacttgtctatgatgtcgcgtcatactatttttcaacacgttgaaatcaggtcagggagagaagtatgaaattattgcagcggggcgtggcgttagcgctgttaaccacatttacactggcgagtgaaactgctctggcgtatgagcaggataaaacctacaaaattacagttctgcataccaatgatcatcatgggcatttttggcgcaatgaatatggcgaatatggtctggcggcgcaaaaaacgctggtggatggtatccgcaaagaggttgcggctgaaggcggtagcgtgctgctactttccggtggcgacattaacactggcgtgcccgagtctgacttacaggatgccgaacctgattttcgcggtatgaatctggtgggctatgacgcgatggcgatcggtaatcatgaatttgataatccgctcaccgtattacgccagcaggaaaagtgggccaagttcccgttgctttccgcgaatatctaccagaaaagtactggcgagcgcctgtttaaaccgtgggcgctgtttaagcgtcaggatctgaaaattgccgttattgggctgacaaccgatgacacagcaaaaattggtaacccggaatacttcactgatatcgaatttcgtaagcccgccgatgaagcgaagctggtgattcaggagctgcaacagacagaaaagccagacattattatcgcggcgacccatatggggcattacgataatggtgagcacggctctaacgcaccgggcgatgtggagatggcacgcgcgctgcctgccggaagcctggcgatgatcgtcggtggtcacagccaagatccggtctgcatggcggcagaaaacaaaaaacaggtcgattacgtgccgggtacgccatgcaaaccagatcaacaaaacggcatctggattgtgcaggcgcatgagtggggcaaatacgtgggacgggctgattttgagtttcgtaatggcgaaatgaaaatggttaactaccagctgattccggtgaacctgaagaagaaagtgacctgggaagacgggaaaagcgagcgcgtgctttacactcctgaaatcgctgaaaaccagcaaatgatcagcctgttaagtccgttccagaacaaaggcaaagcgcagctggaagtgaaaataggcgaaaccaatggtcgtctggaaggcgatcgtgacaaagtgcgttttgtacagaccaatatggggcggttgattctggcagcccaaatggatcgcactggtgccgactttgcggtgatgagcggaggcggaattcgtgattctatcgaagcaggcgatatcagctataaaaacgtgctgaaagtgcagccattcggcaatgtggtggtgtatgccgacatgaccggtaaagaggtgattgattacctgaccgccgtcgcgcagatgaagccagatagtggtgcctacccgcaatttgccaacgttagctttgtggcgaaagacggcaaactgaacgaccttaaaatcaaaggcgaaccggtcgatccggcgaaaacttaccgtatggcgacattaaacttcaatgccaccggcggtgatggatatccgcgccttgataacaaaccgggctatgtgaataccggctttattgatgccgaagtgctgaaagcgtatatccagaaaagcagcccgctggatgtgagtgtttatgaaccgaaaggtgaggtgagctggcagtaatccgaaagtgccggatgtttgcatccggcacaatgcttaatcgcggcgggcgatatcagcaaatttggcatcgaggatctttgccagatcgcctgccgccagttcgatatccagtccgcgcttgccgccggaaacataaatagtggcaaattcttgtgcgggggcgtcgataatcgttggcagacgttttttctgccccagtgggctaatccccccaaccaggtatcccgtgctacgctgcgcgaccatcggatcggccatctcaactttcttggcacccagcgcttttgctacttttttaagatccagttgacctgcgaccggcgtaacggccacggcaaggtgtttcatatcaccgttcactgccaccagcagcgttttgtagacctgatccggattcaaacctaattttttgacgacttcatcgccaaaattggtttcagccggatcgtgctcgtaggtatggatttgaaagctaatcttgtttttttcgagtaatttaactgcgggtgtcatggtaattttcctgccttaaacaaaaaaacgaagcaagcatacgcctgatggcggtccaaaaaaaagagtcatcttgcctaagagtattggcaggatggtgagattgagcgacaatcgagttacaccgtcgcttaaagtgacggcataataataaaaaaatgaaattcctctttgacgggccaatagcgatattggccatttttttagcgcaacatttgcggcaaattcccttctccatacaggtgtagtgcaccgaccgcgaccacatatcgccccggcggcatggcgcgtaatttatcccgccaggcgagatttcgctgatgcatcagcacatcgtacaggctctgactgaacgtattgggcagcgttatatcattattttgcggcggtgcattcagccaccagctcatcatttgttgcagcaaccgtgcgttggtatgccagtgggtcagcgtatcgtccagcagcgccagtcctttgtcagggagctggagcaacatggcaatctggttttcagccccttccagttcaatcacgggtttatgttgttgcttcgccgcctgcaatagctggtaatcgataccgtattctgcccgcagccccagtttttgtgcctgcgtcgcctgaagaaccatcgcgatttgccacagcggttgggtagaaaagagactgggagaaatgcccatctcctggctaatgtgctgcaggttttggagttgctcctcgctaatgcgctcttccagcgcctcgcaggcaggcaaattagcaaaaggcgtatcgctggtggaaacatccgcctcgacgatcagcgcatcggcgtttttgagctttttgagcaaacgggtgggcaggggagccatatcgtggctacccatatgaatactgccaatcagatgaaaatggcgattgccggggagggtgatatcgatggcaggccaggtgtaatgattaccgcgcagcgcggcccaaagcgtttttacccggtacaacagatccatacgacctccctttgtgaaatatcatgctagcgcgcggtgagggatggcgcaaatggagttggagacttgtttaatgtgtttgtatgattcagtatgttcttgcatcgctattcacaaggaagcaacagttaaaaaccatgaaacaggcaacaagaaaaccgacgacacccggagatattcttctctatgaatatctggaaccgctcgatttgaaaatcaatgagttagcagagttgctgcatgttcatcgtaatagcgtcagtgcactgatcaataacaatcgtaaactcactactgagatggcatttcgtctggcgaaagtttttgataccacagtcgatttttggctaaacctccaggcggcggttgatctttgggaagttgaaaacaacatgcgcacccaggaagaattgggacggattgaaacagtggctgaatatttggcacgccgtgaagagcgtgcaaaaaaggtcgcgtaaggccaaaacatcgcttcatctcgtaggccggataaggcgttcacgccgcatccggcatccgagcaccattgcctgatgcgacgcttacccgtcttatcaggcctacaaacttgtgcctgaaccgtaggccggataaggcgtttacgccgcatccggcatccgagcaccattgcctgatgcgacgcttacgcgtcttatcaggcctacaaacctgtgcctgaaccgtaggccggataaggcgtttacgccgcatccggcagtcatgcgtcgatgccaaatgcgccaccctaaagcagcgcatccgcaatgatgtacttattccttcggtttaaaccgcagcaaccggttggcgttactcactacggtaatgctgctgagcgccattgccgctccggcaactaccgggttaagcagtgttccagtgaacggccacaaaataccggcggcgaccggaataccgatactgttgtagataaacgcaccgagcaggttctgcttcatgttgtgcagcgttgcgcgggaaatagcgagcgcatccgcaacgcccatcaggctatggcgcatcagggtaatcgccgcggtttcaatggcaacatcactgccgccacccatcgcaatgccgacatccgcctgagccagcgctggcgcgtcgttaatgccgtcgcccaccattgccacctaacgtccttcactttgcagatgtttgatcgcttcggctttaccgtccggcagcaccccggcgatcacctcatcaatccctgcttctttggcgatcgcattggcggtggttgggttatccccggtcaacatcaccagacgatatcccgctttatgcaggcgttgcagcgccgccacgctatcactacgcaacggatcgcgtactgccagcagggctaccgctttcccgtcaaccgccagcagcacaggcgttgccccttggcttgcctgagcagtaatctccgcttcgatagctttggtaccaacctgttgctcatttaacagcgcctgattgcccagcaataacgcatgaccttcagcttcaccgctcacgcccagcccgcgcaatgtgcggaaaccgttgacctgcggtagctgcatatcacctgctttatcgaggatcgctcgtgccagcggatggctggaaccttgctccagtgccgccgccagacgcaatgcctgcgcttcatcaacatcagcaaatgttttcactgcgacaacctgcggcttcccttcagtcagcgtcccggttttatcgaacactacagtgtcgagtgtactggcgcgttgcagcgcgtcagcgtcccgcaccagcacgccaaactcagccgcccgcccgacgccggaaataatgctcatcggcgtcgccagccccagcgcacacggacaggcaataatcagtaccgtggtggcaatcaccagggtatagacaatctgcggtgccggaccaaagaaataccagattgccgcactgacaagcgcaataaccaccactaccggcacaaatacggcactgattttatccgccagctgaccgatttctggcttgctgctctgggcctggcgcaccatgcgaatgattcgactcagcgtagtatggctgccaaccgcactggcacgaaacagcacactgccgtcctgtaccactgtcccggcatggacgctatcgccttcgcctttttgctgcgggattggttcgcccgtcagcatcgcttcatccagccatgcttcgccctgggtaatctcgccatctaccggcacgcgatcgccggtcgtcaggcgcagcaacatacctggctgcacttctgccagaggcacgcttttttcaccttcgtcagtaaccaggcgtgccgtcggcggggttaaatcgagtaacttttccagcgccttagaagaacgctggcgtgcgcgcgcttccagcatatggccgagattgatcagaccgataatcatcgcgctggcttcgtaataaagatgtcgcgcttccatcgggaaccactgcggccacaggttgacgctcatgctatagagccacgccacgccagtacccagcgccaccagcgtatccatcgtcgccgcaccgttcagcaggcttttccatgcactgcggtaaaaatggccgccggcgaaaaccatcactgccagggttatcaggccgataaccaaccacaggctgcggttgtcagcggtgaccatcatgttatcgccgatcatcccccagaccatcaccgggatacccaccgccagtgcgacaattgcctgccagcggaagcgcttcatcgtagcgacggcggtttcttgctggcgctcgcggcgtttagcgtcatcttcaatcgcttccgcgccgtagcccgctttttccaccgcctgcactaaatcttgtggggaggcactgcccatcaccagcgcagtacgctccgccaggtttacccgtgcctgagtgacgcccggtacgctttgcagcgcattttgtacgcgggtgacacagctggcgcagctcatgccgctcagcagcaactgctggctgtcatcgtcatcggcggtcgctgccggaagcgcctcagaaaccgctgtcagtgcttcgctcgggatactactctccgccagcggtttagcctttgggtggcttacagatgcgtcataacccgcttgtttgatggtttcgatcagctgttctgcactggcagtcccggtaacgtgcgcttcagtgatagacacatccgcctgctcaacatccggacgctgttcaagactttctttcacgcgtttaacgcagtgaccgcaggacaggccgtccagggtcaggtcgatagtttgactcataaaacactcctttaagacagttttgactggctgtgataaaggttaaaccttccagcaaggggaaggtcaagaaattaataaaccaggcgggtaaaagtccgtaaagattaaaaaatcggctcgatttgcatcaggattagacatttatctctttgttttcctgtagttaagttgcgggtgctaagttaaatcaggatgcctgaaaatcggcaccggggtgaggaattacctcccgcatctataaaaaggagttaacaaaagatgttagatgcaaacaaattacagcaggcagtggatcaggcttacacccaatttcacagtcttaacggcggacaaaatgccgattacattccctttctggcgaatgtaccaggtcaactggcggcagtggctatcgtgacctgcgatggcaacgtctatagtgcgggtgacagtgattaccgctttgcactggaatccatcagcaaagtctgtacgttagcccttgcgttagaagatgtcggcccgcaggcggtacaggacaaaattggcgctgacccgaccggattgccctttaacagtgttatcgccttagagttgcatggcggcaaaccgcttagcccactggtaaatgctggcgctattgccaccaccagcctgattaacgctgaaaatgttgaacaacgctggcagcgaattttacatatccaacagcaactggctggcgagcaggtagcgctctctgacgaagtcaaccagagcgaacaaacaaccaacttccataaccgggccatagcctggctgctgtactccgccggatatctctattgtgatgcaatggaagcctgtgacgtgtatacccgtcagtgctccacgctcctcaatactattgaactggcaacgcttggcgcgacgctggcggcaggtggtgtgaatccgttgacgcataaacgcgttcttcaggccgacaacgtgccgtacattctggccgaaatgatgatggaagggctgtatggtcgctccggtgactgggcgtatcgtgttggtttaccgggcaaaagcggtgtaggtggcggtattctggcggtcgtccctggagtgatgggaattgccgcgttcagtccaccgctggacgaagatggcaacagtgttcgcggtcaaaaaatggtggcaagcgtcgctaagcaactcggctataacgtgtttaagggctgatcatgatgaacacggaaggtaataacggtaacaaacctctcggtctatggaacgtcgtttccatcggcattggggcaatggtgggggcggggatcttcgcgctgctggggcaggctgcattgctaatggaagccagcacctgggtcgcctttgcttttggcggtattgtggcgatgttttccggttatgcctatgcgcgtctgggggcgagctatcccagcaatggcggcattatcgacttctttcgtcgcggattaggcaacggcgtctttagcctggcgctcagcttactgtacctgttgacgctggcggtgagcatcgccatggtcgcccgtgcttttggcgcttatgccgtgcagtttttgcatgaaggcagccaggaggagcaccttattttgctctacgcgttggggatcattgcggtgatgacgcttttcaactccttaagcaaccatgcggtagggcggctggaagtgatcctcgtcggcattaaaatgatgatcctgttattgctgattattgccggtgtctggagcctgcaaccggcgcatatttccgtctctgcgccccccagctccggtgcgttcttctcctgtattgggataactttccttgcctatgcgggctttggcatgatggcgaacgcggcggataaagtgaaagatccgcaggtcattatgccacgggcgtttctggtggcgattggcgttaccacgttgctttatatcagcctggcactggttttgcttagcgatgtaagcgcattagagttagaaaaatatgccgataccgccgtagcgcaggctgcttctccgctgctcgggcatgtgggttatgtgatcgtcgtcatcggcgctttactggcgacggctagtgccattaacgcgaacctgttcgccgtgtttaacatcatggacaacatgggcagcgaacgcgaactgccgaagctaatgaataaatccctgtggcggcagagtacctggggcaacattattgtcgtggtgttgattatgctgatgacggcggcactgaatttaggcagtctcgccagcgttgccagcgccacctttttgatttgctacctggcggtgtttgtggtggcgatccgcctgcgtcatgatattcacgccagcttgccgattcttatcgttggtacgttggtgatgttgttggtgatcgttggctttatctacagtctgtggtcccagggtagccgtgcgttgatatggattattggcagtctcttactcagccttattgtggcaatggtcatgaagcgcaataaaaccgtataacatctctctgtgcgcagtacttcctgtattattgtggtggcggtcgatattcgcactggcaaaaaaacgtgcttgaatatctgttgaaaccctttaacaaagcacaggaggcgttgcgcgaacgatgaacatcagcgatgtagcaaaaattaccggcctgaccagcaaagccattcgcttctatgaagagaaggggctggtgacgccgccgatgcgcagcgaaaacggttatcgcacctacacgcagcagcatctcaacgaactgaccttactgcgccaggcacggcaggtgggctttaacctggaagagagcggcgagctggtgaatctgtttaacgacccgcagcggcacagcgccgacgtcaaacggcgcacgctggagaaggtggcggagatcgaacgacacattgaggagctgcaatccatgcgcgaccagctgctggcactggcgaatgcctgccctggcgatgacagcgccgactgcccgattatcgaaaatctctccggctgctgtcatcatcgggcagggtgattaagagctgacggctcggatatgtagggttatcccttctatcgcaatgacttcaacatgcgtacctgcaccgagatcctcgctggcgctgacaggccaactactgtcaccgacgcgcatatgaccgcgcccgttgaccagcggagattccagcacaaaacgtcggccaatcagctgctgcccgcgctggtttaaatgactatcgctgtgcttttgttcgcgcacccgccggctcaaccatttccaccacagccaggcggcgagcagcgtcaggatggcaaacattaccccttgccactcccaacccagcggcaccagccagaccaccaggccggtaatcaccgctgccacgccgctccacaacaaataaccatttccgcccagcatctcggctgccagcagcaaaccgccgagactgagccagaaaatatgtggatgaacgaccattaactccatcatggctgagtccgtttgttggcgctgtctttcaccagctcggcaatcccggcaatgctccccatcaggctgctggcctctaatggcatcatcactactttgctgttactggaggaaccgatctgctgtaacgcttcggtgtatttctgcgctacgaagtagttcaccgcctgaatatcaccggaggcgatagcttcagacaccattttggtggcgcgggcttctgcttcggcggaacgttcacgcgcttcagcctgtaaaaacgcgctctgacgttcgccttccgctttcaggatttggctctgtttttcaccttcggctttgaggatttccgcctgacggatcccttccgcttcaagaatgtaagcgcgtttggtacgttccgctttcatctgcgcgttcatactagagataagctctgccggtgggcgcacgtcgcgaatttcaatacgggtgactttaatcccccacgggttggtggcttcatcgacaatacgcagcaggcgactgttgatgctgtcgcgctgagagagcatttcgtcaagttccatactacccagcacggtacggatgttagtcatggtcaggttgatgatcgccagctccagattgctgacttcataagccgcgcgcggcgcgtcaatcacctgaataaagcacacggcgtcgatggtaacgttggcgttatctttgctgataacttcctgggaagggatatcgagcacttgctccatcatattgatcttgcgaccaatgcgatccataaacggcaccaccagactgagccccggctgtaacgttttggtatagcgaccaaagcgttctactgtccactgatagccctgcggtacgattttgacacccgcgccgacaatgaccagcgcgacaaaaatgagaatcgggataaagataagcatcggaaaaacctcctgttgtaccgtccataatcagcaaaattgctgcttgattaaacaaattatacctgattactgaaagagagttcccccttattcctgcgaaggataaactgtttttagtaaaaatcagaaaaagggaacagcgatgcaggaaaatagtcctttgcttcagctacaaaacgtaggatatctggcgggtgatgcgaagattcttaataacatcaattttagcctgcgtgctggcgaatttaagttaattaccggtccttctggttgtggcaaaagtacgctgctaaaaatagttgctagtttgatcagcccaaccagcggaacgttactgtttgaaggtgaggatgtcagcacactaaagccagaaatctaccgccaacaagtctcttactgcgcccagacaccgacgctgtttggcgatacggtatacgataatctgatctttccctggcagatccgtaaccggcagcctgacccagccatttttctcgattttctcgaacgcttcgccttgccggacagcattttgacgaagaatatcgccgagctatctggtggtgaaaaacaacgcatcagtttgattcgtaacctgcaatttatgccgaaggttttattgctggatgaaataaccagtgcgctggatgaaagtaataaacataacgtcaatgagatgatccatcgttatgtgcgcgagcaaaatattgccgtgctgtgggtgacacacgataaagacgaaattaatcatgcggataaagtgattacactgcaaccgcatgccggagaaatgcaggaagcacgctatgaactcgcataactaaagaaatgcaggaagcacgctatgaacagccataatattactaacgaaagtttagcactggcattaatgctggtggtggtggcaatcttaattagccataaagaaaaactggcgctggagaaaaatattctctggagcgtcgggcgagcgataattcagctgattattgtcggctatgtgctgaagtatattttcagcgtggatgatgccagcctgacattattgatggtgttatttatctgctttaatgcggcgtggaacgcgcaaaaacgcagtaaatatattgctaaagcttttatcagtagctttattgccattacggtcggggcgggaattaccctggcggtgctgattctcagtgggagcattgaatttatcccgatgcaggtgatccctatcgccgggatgattgccggtaacgccatggtagcggtggggttgtgttacaacaatttagggcaacgggtcattagcgaacagcaacagattcaggagaaactgagtcttggtgcgacgccgaagcaggctagtgcgatattgattcgcgacagtattcgcgcggctttaattccgacggtcgatagtgcaaaaacggttggcttagtgagtttaccaggaatgatgtccgggctgatatttgccgggattgatccggtgaaggcgattaaatatcagattatggtgacctttatgctgctcagtaccgccagcttgagcaccattattgcctgctatttaacctatcgtaagttttataatagccgccaccagttggtggtgacgcaattgaagaagaaatgatgcgatgccggatgcgcagcatcgcatccggcgttgtggttcatgtgccgatcaacggaatatcaatacaacaatgcatacagctggcggcgatacttgctcgccagtgcatcacccgtacccagcgcagcgaggatctcctggaacgttttacgcgtctgaccgtctgcggcggtgagatctttacgcagatgcccgaacagcaactccagcgcctcttcattgcgcccaacctgatgcagttgcagcgccagttgcgtcgccagtgcggcatcttctggattctccgccacctgctgttgcaactgttgaatttccggcgtatcagccgcctgcttcagcagttcgatttgcgccaccagcccctggtagcgggtgtcctgatcctgcaacggaatggttttcagcaccgcttccgcatcttcagaacggttcagcgcaatcagcgtttctgccagcagcaggccgatctccccgttctgattgctcaactgccaggcgtctttcagcaatggcagggcatcggtgtaattgctttcctgcatcagttgcatcgcctgctgcgctttcagctcttcttcgcgcggcagcactttatccagcagggcgcggatcgcctcttccggttgcggcccctggaagccatctaccggttgcccgttctggaacagatacacggtcggaatcgcacgcagaccaaactgcgcggcaatcatctgctccgcgtcgcagtccagcttcgccagaataaattgcccgttgtactgcgccgcgaggctttccagaattggggttaactgcaaacagtgctggctacgttcagaccaaaaatagaacagcaccggagtggtcatgctctgttcaagaacctgttgcaggttagattcgttaatgttgacaatattttctacggacatggagtcgctctctgttgtcgatattttctttgacatgggggcttaagcgcgcgcttcaactcacccctgcaatattttgtccatcacgcgccccggcagcaggcgcttaagcaccattaccgcccaggtcaccagcgtcaccggatagcgcatcttcggcttctcgctaataaaagcatggcgtactttgtccaccaccgcttccggtcccaacgtaaagcgggcggcgatgccgggattttcgactggtttatcactttgcgtctggttgacgttgtcggtgaagcgagtacgaatgggaccgggttcgatcaggctgactttaattccgctgtggcgcagctccatgcgcagtgcatcactccacgcctccagcgcatatttactggccgcgtaagcgccacgacccggcgtggagattaatcccatcacgctacttgtcatcacaatacgcccttcaccgtgcggtaacatcgcgggtaacaggcgcatggtgagctggtgtgcgccgaaaaagttggcggaaaactgctgttccatctgcgcacggctgatggtggaaagggggccatacatgccgaatccggcattgttaaagatcccatacagacaattatcggtcagggcgatcacctcgtcggctgcgcgatcaacactttctggactatccagatcgatcaacacgccggtaaatcccatgctgttcatgcgctcaacatcatccggtttccggcaacctgccagcacatgaaaaccctggcgttttaattcgagcgcgctttccaggccaattccactggaacatccggtaattaagacgcttttttgcataactttacctgtcaggatctccgttgctttatgagtcatgatttactaaaggctgcaacttatttaactgtcatgatttactaaaggctgcaactgcttcgccatccagtcggcaataaacggctgggcgtcgcggttgggatgaataccgtcatcctgcatccattgtggcttgaggtagacctcttccataaaaaagggcagcagcggaacatcaaactctttggcgagtttggggtaaatggcgctaaaggcttcattataacggcgaccatagtttgcaggcagacgtatttgcattaacaatggttcagcgttggcggctttgacatcctgcaaaatctggcgcagcgtttgctcggtttgctgtggctgaaaaccacgcaaaccgtcattgccgcccagttcaaccagcacccaacgcggctgatgctgtttcagcagagccggaaggcgcgccagtccttgttggctggtgtcgccgctgatgctggcattaactacgctcgttttactctgccacttatcattcaacaaggcaggccaggccgcgctggcagacattcgatacccggcgctcaggctatcacccagaatcaataacgtgtccgctgcggcggcacggaaggttaacaggaccaggaacaggaagggcaaatgccagcggaaaacattgttgaagttcatcatcttaagaagtccgtcggtcagggggagcatgaactctccatcctcaccggagttgagctggttgtcaaacgtggcgagaccatcgcactggtgggcgagagcggaagcggtaagagtaccttgctggcgatcctcgccgggcttgatgacggcagcagtggcgaagtgagtctggtgggacaaccgctacataatatggacgaagaagcgcgggcaaagttgcgcgcgaagcacgtcggctttgtttttcagagttttatgttaattcctacccttaacgcgctggaaaacgtcgagcttccggctctgctgcgcggtgagagtagcgcggaaagtcgtaacggggcgaaagcgttgctcgaacagttagggctgggtaaacgtctggatcatcttccggcacagctttccggcggtgaacagcaacgagtggcgctggcacgagcctttaatggtcgacctgatgtgctgtttgccgacgaacccaccggcaaccttgaccgccagacgggcgataaaattgccgacctgctgttttccctcaaccgtgaacatggcaccacgttgattatggtgacccacgacctgcaactggcggcacgctgcgaccgctgcttacggctggtgaacgggcagttgcaggaggaagcatgattgcacgttggttctggcgcgaatggcgtagcccgagcctattaattgtctggctggcgctaagcctggcggtggcctgcgtgctggcgctgggcaatatcagcgatcgcatggagaagggcttaagccagcaaagccgtgagtttatggcgggcgatcgggcgttgcgcagtagtcgcgaagtgccgcaagcgtggctggaggaagcgcaaaagcgcggcctgaaagtcggcaagcagctgactttcgccacaatgacctttgcaggcgacacaccgcagctggcgaacgtcaaagcggtggatgatatctacccgatgtatggcgatctgcaaactaatccccctggcctgaaaccgcaggcgggcagcgtattgctggccccacgcctgatggcactgcttaacctgaaaacgggcgacaccattgacgtgggcgatgccaccttgcggattgccggagaagtgattcaggaaccggattccggttttaaccccttccagatggctccgcgtctgatgatgaatctggcggatgtcgataaaaccggagccgtgcagccggggagtcgggtcacctggcgttataaattcggcggcaacgagaaccagctcgacggctatgagaaatggttgttacctcagcttaaacccgaacaacgctggtacggtctggaacaggacgaaggcgcgctggggcgaagcatggaacgcagccaacagttcctgctgcttagcgcgcttctgaccttgctgctggcagtggcagcggtggcggtagcgatgaatcattactgtcgcagtcgctacgatctggtggcgatcctcaaaacgctgggggcagggcgagcgcaactgcgtaagctaatcgtcggtcagtggttgatggtgctgacgcttagtgccgttaccggtggggccataggcctgttgttcgaaaacgtgttgatggtgctgctcaagcccgttctgcctgctgcactaccgccagccagcctctggccgtggctgtgggcgcttggcaccatgacggtcatcagcctgctggtggggctacgaccatatcgcttgttgctggcaacgcagcctttacgcgtattacgtaatgatgtggtagcgaacgtctggccgctgaagttttatctgccgattgtcagtgtggtggttgtgctgctgctcgccggattaatgggtggcagcatgctgctttgggcggtgctggcgggcgcggtagtactggctttgctgtgcggtgtgctgggctggatgctgctgaatgtacttcgccgcatgacgctgaaaagcctgcctctgcgcctggcggttagccgcctgttacgtcagccgtggagtacgttaagtcagcttagcgcatttagcctctcctttatgctgctggcactgctgctggtgttgcgtggcgatctgctcgaccgctggcagcagcagctacctccagaaagcccgaactactttttaattaacatcgccacagaacaggtagcaccgctaaaagcgttcctcgcggaacatcagatagtcccggaaagcttttatccggtggtgcgggcgcggctgacggcgattaacgataagccgacagaaggtaatgaagatgaggcgcttaaccgcgaactcaatcttacctggcaaaatacgcggcccgatcataatccgattgtcgccggtaactggccgccaaaagccgatgaagtgagcatggaagaggggctggcgaaacgcttaaacgttgccctcggtgataccgtgacttttatgggcgatacccaggagttccgcgctaaagtgaccagcctgcgcaaagtggactgggaaagtctgcggcctaatttctattttattttccctgaaggggcattagacgggcaaccgcagagctggcttaccagtttccgctgggagaatggcaacggcatgttgacacaactcaaccgccagttcccgaccattagcctgttagatattggcgcgattttaaaacaggtcggtcaggtgctggagcaggtaagtcgggcgctggaagtgatggtggtactggtcaccgcctgcggtatgttgctgttgctggcacaggtgcaggtgggaatgcgtcagcgtcatcaggagctggtggtgtggcgcacactcggtgcggggaaaaaactgctgcgtaccacgttgtggtgtgagttcgccatgcttgggtttgtttccggcctggtggccgcaattggtgcggaaacggcgctggcagtgttgcaggcgaaagtgtttgattttccgtgggagccagactggcgattgtggattgttctgccgtgcagcggagcgctgctgctgagccttttcggcggctggctgggtgcgcgactggttaagggtaaggcgctgttcaggcagtttgcggggtgatgagagtccctcattaccgcgccttaacccattccgccacttccgcccactcaccgcgaaagacaactttttccgcttttttctcaagctgatagcgatacatcgggtcgtaatattcttcaagtaacggcaccagccaggccagatgaccgtcggtgctgccggtggtgagttgcgttgtcagtgctgcatccagccttgcagccagttcgttatagcgctgtagccccagccgacgcttaatcgcgctaagtccgtgatgcaggtattcgcaatactcctgccagccctgttcgtcgccgtacgcgtgggtaaaatcatgatgcatacgcaagaaatactcttcgttcaggcgctcaagacggatctcaaacggatcttctaccaccgcaatcgccgcctgagtcattcgctcgcgcaggcattccggcaggtgattgctaccgatcatccggctttcgtcttccagcacccacaggcgcaaattctgacgggcgtcggtttttagcatttcggcagccagcaggttttcaaaactcgcctggctaagttgtggttgtaacgtgcgaccaaacgcgctaccgcgatgacgcgccaacccttccagatcaacaccgttcggctgttgctgcactaacagcgttttaccgctgccggtacaaccgccaatcagcactatcggtttttgtgccagttcaatagtcgcctgaatcgcggtctggcgcagtgccttataaccgccttccaccagcggataatcaatccccgctgcatgcaaccagctttgcacaatatgactgcgctgaccgccacgggcgcagcagagaataccttgcggattttgcaggcacgctgcccgccaggcgtccatgcgctgctgacgaatttcacccgccaccagtttatgtcccagcgccagcgctgcgtcactgccttgctgtttatagcaggtgccaacggcggcgcgttcatcgttattcattaacggcagattgatagcggcgggcattgcgccgtgctcaaactcgataggggcgcgaacatcaataatgggcgtatcagcaatcagcagggcacgatagtcctgttccgtgtgtctctcttgcatagttaaaagtgaacctcaaatcagcttgcgcgctattttacgcgccaacgcgcaaggaaacttgatttttaactgcgtgggttgccgaaaatttctaaaaatccgctgatttccggcctgcgctgggtaaacaaggtcacaatatcttctaccgctttgccgctgccaaatttgcgccatgccagactcaatgggctaggagggcgcatcgttgggattacccggctgaccagttgttgattatcgatcatactctggcaaaggctttttggcaaaaaaccaatgccaacgcccgccagatgggcggcgattttcgtttccatatcgggaacaataatctctttttgccctggcaatcgccaggcgacgcgtttggttaaggtgcgggcgctgtcttcaatattgaccgccggaaagcgccgcaactgcgcttctgttagcggctcttcaacgttcgccagcggatgatccgccgccatgacaaagcgccattgcacgcttcctaagggatcaagactaaaggtatttgccagcgcctcagttcccgtgacgccgatagccaggctaaaaccttcgtacaataggctgtcccagacgcccatatagatttgtcgggagatgtgaaactgggtaaaggggtaacgctcattcagccacgccagcaactgggcgacggcctgggggttgtagagcaggttgttgatgacaatattcacctggcgttccacgccatcattcacctgttgcagctcgcttggcatactttccagccagctcagccagtctctggcctgggaaagtagatgctcgccagccgctgtcaacgtcacgctgcgagtcgtacggaaaaacagcgctactccggtattctcttccagaagtttaatgcgataactgatcgtcgccgtggttttacataatcgttctgccgctttactaaaacttcctgtttcagcaaccgcaatgaaagtccgcaaggtttctggatcgaacatcttcaggtatccccttttaaatccgcaagttgcgtgattttcttatcctctgatttatcagtatttttacatgataaccctgttcaatttgtggactaaatctagttttggaaaaatattccaacttttgtattgatgttgttctcttaaggttttagattgcctgttattgaaaccaagctgaccggtcggcggtggttgaacggaattatgttacaaggacaaaaagatgaaacttcaggtattaccgttaagtcaggaagcctttagtgcttatggcgacgtaatcgaaacgcagcaacgggattttttccatattaacaatggcctggtggagcgttaccacgatttggcgctggttgagattcttgagcaagactgtacgcttatcagcattaaccgcgcgcaaccggcgaatctgccgctgaccattcacgaactcgaacgtcatccgctgggtactcaggcctttatcccgatgaaaggtgaggtgtttgtggtggtcgtggcgttaggtgacgacaaaccagacctgagtacgctgcgggcgtttatcaccaacggcgaacagggagtgaattaccatcgtaacgtctggcatcacccacttttcgcctggcagcgcgtcaccgattttctgaccatcgatcgcggcggcagtgacaactgtgatgttgaaagtattcctgaacaggaactctgttttgcgtgacgcctgcaaccgacttgcataagataaactaattgttcattgtttatgctcacttgtaggtcggagttaacgtaggtatgacggaagttagacggcgcggcaggccaggacaggcggagcctgtggcacagaagggcgcacaggcgttagagcggggaattgcgattctgcaatatttggaaaaaagtgggggaagtagcagcgttagcgatatttctctcaatctggatttgccgctctccacgacctttcgcttgctgaaggttttacaggcagcggattttgtctatcaggacagtcaattaggctggtggcatataggattaggtgtctttaacgtcggtgcggcgtacatccataaccgcgatgtcctctccgtcgccgggccgtttatgcgccgcctgatgttactttccggcgaaacggtcaatgtcgcgatccgtaacggcaatgaagcggtattaattggtcagttagagtgtaaaagcatggtcaggatgtgtgcgccactgggcagtcgtctgccactgcatgcttccggtgcgggcaaagcgctgctttatccgctggcggaagaggagttgatgagcatcattctgcaaaccggtttgcagcagtttacgccaactacgcttgtggatatgcccaccttgctgaaggacctggaacaagcgcgtgaactgggctataccgtagataaagaagagcatgttgtaggtctgaattgcatagctagtgcaatttacgatgatgtcggtagtgttgttgccgctatctccatctccgggcctagtagtagactgacagaagatcgttttgtcagtcagggtgagctggtcagagacaccgcccgcgatatcagcacggcgttgggactgaaagcacatccataatgtctgtcgcatcccgctctgcggagcgggtttttttgacaaaatttgaaagttggaaaaattttccaataaatagaggtaggaataaaatggcaaaaatgagagccgttgacgcggcaatgtatgtgctggagaaagaaggtatcactaccgccttcggtgttccgggagctgcaatcaatccgttctacagtgcgatgcgtaagcacggcggtattcgtcacattctggcgcgtcatgtggaaggtgctagccacatggcggaaggttatacccgcgcaacggcagggaatatcggcgtatgtctggggacttccggtcctgcgggcacggacatgatcaccgcgctctattccgcttctgctgattccattcctattctgtgcattaccggccaggcaccgcgcgcccgtctgcataaagaagattttcaggccgtagatattgaagcaattgctaaaccggtcagcaaaatggcggttacagttcgtgaagcggcgctggtgcctcgcgtgctgcaacaggcatttcacctgatgcgttctggtcgtccgggtccggtactggtggatttaccgttcgacgttcaggttgcggaaatcgagtttgatcctgacatgtacgaaccgctgccggtctacaaacctgctgccagccgtatgcagatcgaaaaagctgtagaaatgttaatccaggccgaacgtccggtgattgttgccgggggcggggtaattaatgctgacgcagctgcactgttacaacagtttgctgaactgaccagcgttccggtgatcccaacgctaatgggctggggctgtatcccggacgatcatgaactgatggccgggatggtgggtctgcaaaccgcgcatcgttacggtaacgcaacgctgctggcgtctgacatggtgtttggtatcggtaaccgttttgctaaccgtcataccggcagcgtagagaaatacaccgaagggcgcaaaatcgttcatattgatattgagccgacgcaaattggtcgcgtgctgtgtccggatctcggtattgtctctgatgctaaagcggcgctgacactgctggttgaagtggcgcaggagatgcaaaaagcgggtcgtctgccgtgtcgtaaagaatgggtcgccgactgccagcagcgtaaacgcactttgctgcgcaaaacccacttcgacaacgtgccggtgaaaccgcagcgcgtgtatgaagagatgaacaaagcctttggtcgcgatgtttgttatgtcaccaccattggtctgagtcaaatcgctgcggcacaaatgctgcatgtctttaaagaccgccactggatcaactgtggtcaggctggtccgttaggctggacgattccggctgcgctaggggtttgtgccgctgatccgaaacgcaatgtggtggcgatttctggcgactttgacttccagttcctgattgaagagttagctgttggcgcgcagttcaacattccgtacatccatgtgctggtcaacaacgcttatctggggctgattcgtcagagtcaacgcgcttttgacatggactactgcgtgcaactcgctttcgagaatatcaactccagtgaagtgaatggctacggtgttgaccacgtaaaagtagcggaaggtttaggttgtaaagctattcgggtcttcaaaccggaagatattgcgccagcctttgaacaggcgaaagccttaatggcgcaatatcgggtaccggtagtcgtggaagttattctcgagcgtgtgaccaatattagcatgggcagcgaactggataacgtcatggaatttgaagatatcgccgataacgcagcggacgcaccgactgaaacctgcttcatgcactatgaataagggagataaataatgttacgtttctctgctaatttaagcatgttatttggagaatatgattttctcgcccgttttgagaaagctgcgcagtgtggttttcgcggcgttgaatttatgtttccttatgactacgacattgaagaattaaaacatgtgctggcgagtaataaactcgaacatacgctgcacaatttaccggcgggtgactgggcggcgggggagcgcggtattgcctgtattcctggccgtgaagaagagtttcgggatggcgtagcagcagcgattcgttatgcccgtgcgctgggtaataaaaaaattaactgtctggtcggtaaaacgccggctggtttcagcagtgaacagattcacgcaacgcttgtagaaaacctgcgttatgccgcgaatatgctgatgaaagaagatattttattactgattgaacctattaaccattttgatattcctggtttccatctcaccggaactcggcaggcgctgaaattgattgatgatgttggttgctgcaatttgaaaattcagtatgacatttatcatatgcagcggatggaaggtgaattaaccaacaccatgactcagtgggctgataaaattggtcacctgcaaattgccgataatccgcatcgcggcgaaccgggaaccggagaaattaattatgattatctctttaaggtaatcgaaaattctgactacaacggttgggttgggtgtgaatataaaccccaaaccaccacggaagccggtttacgctggatggatccgtaccgttaaaacgtaacgctattcagacaatgcttttttaggccgctaagttggcaggggatcgtgttgtctgaattcaggaaaagcgaaatttaaaagaggttaattatgaaactgggatttattggcttaggcattatgggtacaccgatggccattaatctggcgcgtgccggtcatcaattacatgtcacgaccattggaccggttgctgatgaattactgagtctgggtgccgtcagtgttgaaactgctcgccaggtaacggaagcaagcgacatcatttttattatggtgccggacacacctcaggttgaagaagttctgttcggtgaaaatggttgtaccaaagccagcctgaagggcaaaaccattgttgatatgagctccatttccccgattgaaactaagcgtttcgctcgtcaggtgaatgaactgggcggcgattatctcgatgcgccagtctccggcggtgaaatcggtgcgcgtgaagggacgttgagcattatggttggcggtgatgaagcggtatttgaacgtgttaaaccgctgtttgaactgctcggtaaaaatatcaccctcgtgggcggtaacggcgatggtcaaacctgcaaagtggcaaatcagattatcgtggcgctcaatattgaagcggtttctgaagccctgctatttgctagtaaagccggtgcggacccggtacgtgtgcgccaggcgctgatgggcggctttgcttccagtcgtattctggaagttcatggcgagcgtatgattaaacgcacctttaatccgggcttcaaaatcgctctgcaccagaaagatctcaacctggcactgcaaagtgcgaaagcacttgcgctgaacctgccaaacactgcgacctgccaggagttatttaatacctgtgcggcaaacggtggcagccagttggatcactctgcgttagtgcaggcgctggaattaatggctaaccataaactggcctgatacccgcaataaaaatggccgatatcagaaaatgaatcggccagcaatattaaaaaagaaagcagccaaagatgttgctagtgtattaaaaataatatttttattttatttgttcctcatagctagattaaaacaacgttatagcatacgtgaaattaagagggatttatggaacatcagagaaaactattccagcaacgcggctatagcgaagatctattgccgaaaacgcaaagccagcggacctggaaaacatttaactattttaccttatggatgggtagcgttcataacgttcccaattatgtgatggtcggcggcttttttattctcggcttgtctacctttagtattatgctggcaattatcctcagcgcctttttcattgccgcggtaatggtattaaacggtgctgcgggcagtaaatacggtgtgccttttgccatgatcctgcgtgcttcttacggtgtacgtggtgcactgtttcccggattattaaggggcggaattgccgccatcatgtggtttggtttgcaatgttacgcggggagtctggcctgcttgattctgattggcaaaatctggccgggatttttaactctcggtggtgatttcactctgttaggcctttctctaccgggcttaattactttcttaatcttctggctggtcaacgttggtataggttttggcggtggcaaagttttaaataaattcactgccattcttaacccgtgcatctatatcgttttcggcggtatggcgatttgggcgattagtctggtcgggatcggtccaatctttgactacattccgagcggtattcagaaagcagaaaacggtggcttcctgttcctggtggtgattaacgcggtagttgcggtctgggcggcaccggcggtgagcgcatccgactttacgcaaaacgcccacagctttcgtgagcaggcgctggggcaaacgctgggtttagttgtggcctatattctgtttgcggtcgccggggtatgtattattgccggagccagtattcactacggcgctgatacctggaacgtgctggatattgttcagcgttgggacagcctgttcgccagcttctttgcggtactggttattctgatgacaactatctccactaacgcgaccggtaatattattccagccggttatcagattgccgccattgcaccgacaaaactgacctataaaaacggcgtactgattgccagtattatcagcttgctgatctgcccgtggaaattaatggaaaatcaggacagcatttatcttttcctcgatattatcggcggaatgcttggtccggtaattggtgtcatgatggcgcattattttgtggtgatgcgcggacaaattaatcttgatgaactgtataccgcacctggcgattataaatattacgataacggttttaacctcactgcgtttagtgtaactctggtggccgttattttatctcttggcggtaagtttattcactttatggaaccgttaagccgtgttagttggtttgtcggcgtcatcgtcgcctttgcggcctacgccttattaaagaaacgtacaacagcagaaaaaacaggagagcaaaaaaccataggttaattaatcccgatattgaacattgagttaaaaaccaatctgtattttacaaggagtttgttatgtcttttgatttaatcattaaaaacggcaccgttattttagaaaacgaagctcgcgttgtagatatcgccgttaaaggcggaaaaattgctgctatcggtcaggatctgggcgatgcaaaagaagttatggatgcgtctggtctggtggttagcccgggcatggttgatgcgcacacccatatttctgaaccgggtcgtagccactgggaaggttatgaaaccggtactcgcgcagcggcaaaaggtggtatcaccaccatgatcgaaatgccgctcaaccagctgcctgcaacggttgaccgcgctagtattgaactgaagttcgatgccgctaaaggcaagctgactattgatgcggcacaactcggtggcctggtgtcttacaacatcgaccgtctgcatgagctggatgaagtgggcgttgtcggcttcaaatgcttcgttgcgacctgtggcgatcgcggtatcgacaacgacttccgtgatgtaaacgactggcagttcttcaaaggtgcgcagaagctgggcgaactgggtcagccggtgctggtgcactgcgaaaacgcgctgatttgtgacgaactgggcgaagaagcgaagcgtgaaggtcgcgtaaccgctcatgactatgtggctagccgtccggtatttaccgaagtggaagcaattcgccgcgtactgtatctggcgaaagttgctggttgccgtctgcacgtttgccacgtcagcagcccggaaggtgttgaggaagtgactcgtgcacgtcaggaaggtcaggacgttacttgtgaatcctgcccgcattactttgtactggataccgatcagttcgaagaaatcggtactctggcgaagtgtagtccgccgatccgcgatctggaaaaccagaaaggcatgtgggaaaaactgtttaacggtgaaatcgactgcctggtttccgaccactctccatgcccgccggaaatgaaagccggtaacatcatgaaagcatggggcggtatcgccggtctgcaaagctgcatggacgtgatgttcgatgaagcggtacagaaacgcggtatgtctctgccaatgttcggcaaattaatggcgactaacgcagcagatattttcggtctgcagcaaaaaggccgtatcgccccaggaaaagatgccgacttcgtcttcattcagccgaatagcagctatgttcttaccaatgacgatctggaatatcgccacaaagtcagcccgtatgttggccgtaccattggcgcgcgtatcacgaaaaccatcttacgtggtgatgtgatttacgacattgaacagggcttccctgttgcgccgaaaggtcaatttatccttaaacatcagcagtaatctggcccctgcaatgcccgtccttgcggcgggcattctccggttaaggtgtgtttatgttcaattttgcagtcagccgcgaaagcctgttaagtggatttcagtggtttttctttattttttgcaacacggttgtggttcctcctacgctactttctgcttttcagttgccgcaaagtagcctgcttacgctcacgcaatatgcttttcttgctaccgcactggcctgcttcgctcaggcgttttgcggtcatcgtcgcgctattatggaagggccaggtggcctgtggtggggaaccatccttactatcacccttggtgaagcaagccgcgggacaccgatcaacgatatcgccaccagcctggcagtggggattgcactctccggcgtgctgacgatgttgattggttttagcggattaggccatcgcctggcacggttatttacgccgagcgtgatggtcttgtttatgttgatgctgggcgcgcagctgaccactatctttttcaaaggtatgctcgggctgccgtttggcatagccgacccgaattttaaaattcagttaccgccgttcgcgctcagcgtggcggtgatgtgcctggtactggcgatgattatcttcctgccgcaacgttttgcccgttatggcctgctggtcggcaccataaccggctggttgttgtggtacttttgctttccttctagccacagcctctccggtgagttgcactggcagtggttcccgctcggcagtggcggtgctttgagcccgggaattattctgacggcggtgattacaggtctggtaaatatcagcaatacctacggtgcgattcggggcacggatgttttttatccgcagcagggcgcagggaatacgcgttatcgtcgtagctttgtggcgaccggatttatgacgctgataaccgtaccgctggcggtaattccatttagtccgtttgttagttccattggtttattaacccagactggcgattacacgcggcgtagctttatttatggcagcgttatttgcctgctggtggcgctggttcctgcactcacgcgactgttttgcagtatccctttacccgtgagtagtgcggtcatgctggtttcttatctgcctttactcttttccgcgctggtgtttagccagcaaataacgtttaccgctcgcaatatttatcgactcgcattgccgttatttgtcggcatatttttaatggcattaccgcctgtgtatctgcaagaccttccattaacgcttcgtcctctgctcagtaacggcttattggtcgggattttactggctgttcttatggataaccttattccgtgggaacgcatcgaataatttgttgaaaaaggattgataatgaagattgtcattgcgccagactcttttaaagagagcttaagtgcagaaaaatgttgtcaggcaattaaagccgggtttagcaccctctttcccgatgcgaactatatctgtttgccgatagcggatggcggcgaagggacggtggatgcgatggtcgccgcgacgggcggcaacatcgtgacgcttgaagtctgcgggccgatgggcgaaaaagtgaatgctttttatggccttaccggcgacgggaaaacggcggtgattgagatggcggcagcaagtggcctgatgctggtcgcgcctgaaaagcgtaatccgttgctggcctccagttttggtacgggggagttaattcgtcatgcgctggataacgacattcgccatattattctcggcattggcggcagtgcgacggtcgacggcggtatgggcatggcgcaggcgctcggtgtgcgtttccttgatgccgacggtcaggcgctggcggcaaacggtggtaatttagcgcgcgtggcaagcattgagatggatgaatgcgatccgcgtctggcgaattgccatattgaagtagcatgtgacgttgataacccgctggtaggggcacgcggcgcggcggcggtgtttggcccgcaaaaaggggcaacgccggagatggtcgaagaacttgaacaggggctgcaaaattacgcccgtgttttacaacagcaaactgaaattaatgtctgccagatggcgggcggcggcgctgcgggcggtatgggtattgcggcggcggtatttctcaatgcggatattaaaccgggcattgaaattgtgttgaatgcggtcaatcttgcgcaggcagtgcagggcgcagcactggtgattaccggggaagggcgcatcgacagccaaacggcaggcggtaaagcgccgctgggtgtggcgagcgtggcgaagcagtttaatgtaccggtgattgggattgctggcgtattgggtgatggcgtggaagtggtgcaccagtacggcattgacgcggtattcagcattttgcctcgtctggcacctttagccgaagtgctcgccagcggtgaaaccaatctcttcaacagcgcgcgaaatattgcctgcgccattaaaataggtcagggaattaaaaactaacccttacctttaaagcggatgcgatttatatcgcataagagtgcagtactcatgccggatgcggcatgagtaccatatccttcctgaaaatcgcgcaaattctatatattgcagagatcatgtaggcctgataagcgaagcgcatcaggcaatgttacaaaaaaagccacggtataaaccgtggcaaaatccaacatagctaaaaataatcaggcgagtggtatgacttaaatctctacgtcgcggttacaatctttgctgtaaatatagctgaacgcttcaccacgccctacaccataaccagcctgtaaagaataagcgcccataaagatgtaatcgccttttttcaccgggatccagttattgtcgaggttataaaccccctgaccggaaagaatataggcaccgtgttcctgaacgtgtgtttcgatataaccgtggctggcacctggtgcaaaagagaggatatgcatgttcatatcaaaacctaactctttgggcagaaaatccagcagaataacatcgtccatgccttcataatgaatgcgttccagttcgctggcattgccagaaaccagccacggtgcatagccttctaccggaacatagcggcgcttatataaaaagatttggctgtcttcggcctgggcgttaacaaacgtcattaaggagcctggcgggcaataaagatagccaccttcgcttaaggcaaatgttttgccttcggctttggcagtgatatttccagagatcacatacaggaacgtttcaatgccttcgccaccgaagccctgttggttgccaccgttttgatgcagtgtgaccagataatcaacaaaagaggcacccagctttggcgtggagaggattgtcgcgtcacaattttcaaagcccggaataatattttttaccagaccatccggggttaacagtgcgaaattaccgtgtttaacaatcgcacggttagccagtaaatcttcgcggtaaccggtgacgttatttaaatatcccatttatgactccttatttctgccaggcaagttgataaagcatgagtgccaacgttttgaccccttcggcaaggtcggtaatattggtgcgttccgccgggttatggctgatcccgttgatgctggggataaaaatcatgcaggttggtacgcgaggcgcgaaaatttgcgcgtcgtgcccggcaccactgtgcatcacccggtaattcagtttttctctttcacacaattctgtcagggtggcgaccagctccttattcatcggcacgggttcttcgtccatccataaatcgatatcaataccaatgtccatttcatcgcaaatcgcccgcatgtcgttttctaactgttgggtgaaatcgcgcagcacggcagcgtcggtatgacgacaatcaatggtgaacgtggttttacccggcaccacatttaccgtattcgggcgcggctctactttgccaaaggtcagaaccagcggatcgcccatccttttcgctttttcgacgctctgatggcaaatgcgactgaaagcgtaaactgtatcacgacgataacccatcggcgtggtgcctgcatggttactttcgccgttcagcgttaccgtataacgacgctgcccgacaattgcattcaccacgccaatactttgcccattactttccagcacacagccctgttcaatatgcagttcaacaaaggctttaatatcctgacgcggagttagtggggcgttcggaagagtaaatccgcaagccttcatcgcatcgacaaaactatttcctttggcatcacagatattccgcacgtcgtcaggattcgccagcccaaaaatatttttactgccccagaagacatacgggaagcggctgccttcttcttctgccatcgccaccacttcgaccgtacgtagcggcgcgccgtattgcgttttcagccagtcaattgccagccacgccgccagcgcgccgaattgcccgtcaaggttaccgccgttaaccacggtatcgatatggctaccgctcagaaccacttcctgtggatattcggtgccattcaggcgaccgtataaattccccacttcatcgaaacgtgtttccagcccgcttgctgccattctttttttaaattgctgctgggtttccagccattccgggctataaagtaaacgggtcatcccacccgctgggtcagcgccaaaagaggaaagccagggcagcgtttcttctatagcttgacggaaatgtgtaatcataagaaagtcctgtctcaataattattgcgcaaagggatttttcgtttcgtaactcgtgttataaagcgcgtcggaaattaaatactggtaaatatcatcaacaatttcgatgccttcgacggcggctttgcgttgtttaatatcctgatcctgtccgggataataaacctgattaaaaccgggcgcgggggtaatggcatttaattcgcgcatggtctggctaagatgttgacggaataattcgctggaggagaaaaagttcggattaataactatatgtaattgccccaaattacgccctgcgtgtaaatcgtcatacatgctactaacctgtcgcccgaacggtaagccgagtaagacgccactgaggacgtcaatcatcatcatcaggccatacccttttggcccggcggcggggagcagagcatgtaccgcgaacggatcggttgttggtacaccgtttttatcgaccgcccaggtatccgggatagacatattacggctgcgggcgtcgagcacttttccccatgcctgtacggtagtcgccatatcaaaggtaaggatctcgtcgccttctcccggcgcggcaaaggccagggggttagtaccgtagtaaatttccgcgccgccaaacggcaccaccattggatcggactggcacatgctaatgccaatgaatccggcgcgggctgcctgctgcacaaaataagagattgcgccgctgtgacccatccggctgataccgaccaccgcaacgccattttgctgggcggttttgatggcatgttccatacccattttcgccgcgacctgtccggcggcattgtcggcatgtaaaattgcgctgcacggcccggtttcctcaagacgaaactccggttcgcggttggtgccgcctttactaatgcgttccgcgtagtattccacgcgcaccgcgccatgagagtggatccctctggcatcggcgtaaaccaatacttcagccacggttgcagcgtgctcacgttttaacccagcctggcagagtttattctcaattagctggtggagtgtttcccgactgattttcatctgtcttcctttttaacgacggtgtgaagcatgactgcaattaacatacagggaaaatatctggattatgtgatccagacaggcaaaaaaatatagttagaatttatttgataatccgctcacttttaacctgatttttaaaacaacaacgcttattaaaaaataatgagtaatagcctggtggttatttgaattcttttgttaataattcctgtgtgatattcatcaccttatttactcgttgtcatcgataccgtaatcgccacattaacactgctcgtgcaattgccatgggtgcaatttttaaggagttgttatgatccacgcctttattaaaaaagggtgttttcaggatagcgtcagtttaatgattattagtcgaaaactcagcgaaagtgaaaatgttgatgatgtttccgtaatgatgggtacgcccgccaataaagcgttattagataccacaggtttctggcatgacgattttaataacgccacgccgaacgatatttgcgtggcaattcgtagcgaagcggcggatgcggggatcgcgcaggcgattatgcagcagcttgaagaggcgctaaaacaactggcgcaggggagtggcagcagccaggcgttgacgcaggtgcgtcgctgggacagtgcctgtcagaaattacccgatgccaatctggcgctgattagtgtggctggcgagtatgcggcggagctggcaaaccaggcgctggatcgcaacctcaacgtgatgatgttctccgataacgtcacgctggaagatgaaatccaacttaaaacccgcgcgcgggaaaaaggcttgctggtgatggggccggactgcggtacgagcatgattgccggcacaccgctggcttttgctaacgtgatgccggaaggcaatattggcgtcattggcgcttccggtaccgggattcaggagctgtgtagccagattgcgctggcaggggagggaattactcacgcgattggccttggcgggcgcgacctcagccgtgaagtgggcggcatcagtgcgctaacagcgctggaaatgctcagtgcagacgagaaaagcgaagtgctggcatttgttagtaaaccacctgccgaagctgtgcgtctgaaaattgttaatgccatgaaagcaaccggcaaaccgacggtggcgctgtttttaggttataccccggcggtggcccgcgacgagaatgtctggtttgcctccagcctggatgaggccgcacgcctggcttgcctgcttagtcgcgtcacggcgcgacgtaacgcaatagcgcctgtcagcagcggatttatttgcggtttgtataccggcggtacgctggctgccgaagcggcgggattacttgccggacaccttggcgtggaagccgacgatacccatcaacatggcatgatgctggacgccgatagccaccagattattgacctcggcgatgatttctacaccgtcgggcgtccccatccgatgatcgacccaaccttacgcaaccagttaattgccgatctcggcgctaaaccgcaagtgcgcgtgttgctgcttgatgtcgtgattggcttcggtgcgaccgccgatcctgccgccagcctggtgagcgcctggcaaaaagcctgtgccgcgcgtttagataatcaaccactgtatgccattgccacggtgacaggcactgaacgtgacccgcaatgccgcagccagcaaatcgccacgctggaagatgcggggattgcggtcgtgagtagcctaccggaagccaccttgctggcggcagcgttaattcatccgctcagccctgccgcacagcaacacacaccgagtttactggaaaacgtcgccgtgattaacatcggattacgcagctttgcgctggagctacaaagcgccagcaaaccggttgtgcattaccaatggagcccagtcgccggtggcaataaaaaactggctcgtttattagaacgtttgcaataaggggttcccatgtttacatcagtggcgcaagccaatgctgcggttatcgaacaaattcgtcgcgctcgtccacactggctggatgtgcaaccggcttcttcacttatcagcgaactaaacgagggcaaaacactgcttcacgccgggccgccaatgcgctggcaggagatgaccggacccatgaaaggggcgtgcgtgggcgcatgtctgttcgaaggttgggcgaaagatgaagcgcaggcgctggcaatactggagcagggggaagtgaacttcattccttgtcaccatgtgaatgccgtcgggccaatgggcggtattacttctgccagtatgccgatgctggtggttgagaacgtgaccgacggcaaccgggcgtactgcaacctcaacgaaggtatcggcaaagtgatgcgttttggcgcttacggcgaagatgtcctgactcgccatcgctggatgcgcgatgtgttaatgccagtattaagcgcggcgctggggcgcatggagcgcggtatcgatctcacggcgatgatggcgcagggcattacgatgggcgatgagttccatcaacgcaatattgcttcctctgcactgttaatgcgtgcgctggccccacaaattgctcgcctcgatcatgataaacagcacatcgccgaagtgatggatttcctcagcgtgaccgatcagttcttcctcaacctcgcgatggcttactgcaaggcggcgatggatgctggcgcgatgatccgcgcaggcagcatcgtcacggcaatgacccgcaacggcaatatgttcgggattcgggtaagcgggctgggcgaacgctggtttactgcgcctgtaaacactccgcaaggtctgtttttcaccggcttctcgcaggagcaggcgaacccggatatgggcgatagcgcgattaccgaaacctttggtatcggaggtgcggcaatgatcgcagcgcctggcgtaacgcgctttgtcggtgcgggtggcatggaagcggcaagagcggtatctgaagagatggcggaaatttaccttgaacgcaatatgcagttgcagatcccaagctgggattttcagggcgcgtgcctggggctggacattcgtcgcgtggtagaaaccggcattacgccactcatcaataccggtatcgcccataaagaggcggggatcgggcagattggcgcaggcaccgtgcgggcaccgctggcgtgctttgaacaggcgctggaagcactggctgaaagcatgggtattggttgaggaacgcgcaatgacgatcatccatcctctgcttgccagtagtagcgcaccgaattatcgccagtcctggcggttagcgggagtgtggcggcgggcgattaacctgatgacggaaagcggcgaactgttaacgttgcatcgtcagggtagtggtttcggccccggaggatgggtgcttcgccgtgcgcaattcgatgcgttatgcggtggattatgcggcaatgaacgaccacaggttgtggctcaagggattcgcctcgggcgtttcacggttaaacagccacagcgttattgtttgctgcgtattacgccgcctgcgcatcctcaaccacttgcagctgcatggatgcaacgcgcggaggaaaccgggcttttcgggccactggcgttggcggcaagcgatccgctgcctgctgagttacgccagtttcgtcactgttttcaggccgcgctcaatggcgttaagaccgactggcggcactggctgggtaaaggccccggattaacgccgagtcatgatgacacgctgagcggaatgctgctggcggcctggtattatggcgctttagatgcgcgctccggtcgtccgttttttgcctgttccgacaatctgcaactcgttaccacagcggtgagcgtcagttatttacgttatgccgcgcaaggatatttcgccagcccactcctgcactttgttcatgctctgagttgcccgaaacgtaccgctgttgcgattgatagcctgctggcgctggggcatacgagtggggcagatacgctgctggggttctggcttggccaacaattattacaaggaaaaccatgaaaacactggttgtggctcttgggggcaacgccttactccagcgcggtgaggcgctgacggcagaaaatcaatatcgcaatatcgccagtgctgtacccgcgctggcacgcctggcccgttcttatcggttggcgattgttcacggcaacgggccgcaggtggggctgctggcattgcagaatctggcgtggaaagaggtagaaccgtatccgctggatgtgctggttgcggaaagccaggggatgattggctatatgctggcgcagagtttgagcgcacagccgcagatgccgcccgtgacgacggtgctgacgcgcattgaggttagccctgatgatccggcgtttttgcagccagagaaatttattggtccggtttatcagccagaagaacaagaggcactggaagcggcttacggctggcagatgaaacgtgatggtaaatatttgcgccgggtggtggcgtctccgcaaccgcgtaaaattctcgacagcgaagccatcgagttgttgctcaaagaggggcatgtggtgatttgcagtggcggcggcggtgtgcctgtgacggatgacggagcagggagtgaagcagtgattgataaagatctcgccgctgcgttgctcgccgagcagattaatgcagatggactggtgatcctcaccgatgctgatgcggtatatgaaaactggggaacgccgcagcaacgtgccattcgccatgccacaccggatgagttagcgccatttgccaaagccgatggtagcatggggccgaatgtaacggcggtgagtggttatgtcagaagccgtggtaaacccgcgtggattggggcgttaagccgaattgaagagacgctggcgggcgaagcggggacctgtattagcctgtaatcgtaggcattagacatttgtgcctgatgcgacgcttgacgcgtcttatcaggcctacaaccggtgccgcatccggcaattggtgcacaatgcctgatgcgatgcttgacgcatcttatcaggcctacaatgggtaccggatcggtaggccggataaggcgtttacgccgcatccggcaagaatagagcaccagttaaccgaacttactctgcgcccaaatcacgccgctggcatattccggcggcagcagcgggattaaggcttccagcgtcgcagtcagacggcttgtgtcgctgtcggtcaaattcagatgccccactttacgccccggacggacttctttgtcgtaccagtgcagatgcaccagcggcagtttcagccagtcataattcacatcgctaccaatcagattgatcatcacgctcggattattcaccactggttgcggtaacggcagatcggtaatcgcccgcagatgcagctcaaactggctgatgctggcaccgttttgtgtccagtgaccgctgttatgcacacgcggtgccagttcgttgatcaacagaccttgcggggtgacaaaacactccatcgccatcacgcccacatagcccagctcctgcataatcgcgctcagcatctcttcggcttgcgcctgctgctgtgcgttggcctgcggaaaagcgacgctggtgcgcaaaataccgtcctgatgcaggttatgcgtcagcggataaaacacggtgctgccatcaaagccgcgcgcgccaaccaggctcacttcaccagagaagttaatgccctgctcgacaatacattcgccgtaacactctgccggtaactgttcggtttcatttgcgcgtaaacgccattgaccgcgaccgtcataaccaccagtgcgacgcttaacaatcgccagctcacctaaacgatcaaacaccgcaggccactcgctgcgttcggcaagtaactgccacggtgcagtcggcaggtggagcttatcgaaaagctgcttctgagtcagacggtcagcaataatcgggaacacatcgcggttcacaaaggccggatggcgcgccagctcgcgggttaatgcggtttccggccagcgttctatctcagcggtaatcacgctttgttgaaaaggcaccgccgccggttcagcgtccagcccgactggccagacagcaatgcctaacggttcgcctgcctgacgcagcatacggcctaactgcccgttaccgaggacgcaaacctgtttcatgccgcacctcgcgggtccgggttttccagcacttcgtcggtctgggctttgcgccagtcattcagacgctggtgcagttctttatcatgagtcgcaagaatttgtgctgccagtaacgccgcgtttgccgcgccagctttaccaatcgccagcgtacccaccggaatgccgcgcggcatttgtacgatggagtagaggctatcgacaccgctcagtgcggcgctctgtactggcacgcccagcaccggcaccagcgttttggcggcaatcatgcctggcagatgcgctgcgccgcctgcgcccgcaataatcacctgataaccgttctcttcggcgctttcggcgaagctgaacagtttatcgggggtgcggtgagcagaaaccacttcaacgtggtgcgggacattcaggatttcgaagatttcggcggcgaactgcatggtagcccagtcgcttttggaccccatcacgatggcgacacgcgccggattattgcgggaagacatgcgtcttaaaactcctgtggtgcacaactctcggctttagagggcacagagaatagcacggaaagagagcaaggaaaacggttgcgtggctgtgaaatcagcaaagttgcgggttttttaaaacggaaaatgaatcagctcaacgtcatccgccgtgactttcaccatactaccttccgtatgccaggcacccagtaccacgcgaaaagcaggttgctgattggcgataagttcatgcaccgccgggcgatgggtatgcccgtggatcagccattgcacctgatgtttttccatcgcactgaccaccgcgttttggttaacgtccatgatcgccaggcttttactgctgttggcttctttgctgttcgcgcgcattcgcgcggcaatgcgtttgcgcacaaacaacggcagggcgaggaatagcgtctgcagccagggtttgtggaccttggcgcgaaaagcctgataacccgcgtcatcggtgcacagcgtgtcgccatgcataatcaacacccggcgaccataaagttcgagcaccttttcttccggcaataacgtcatgccactttcacgggcaaagcgtttgccgagcagaaaatcacggttgccatgaatgaaataacagggaacgccggaatcggacaccgctttgatcgccgccgccatcttgcgatggagtgggttgggatcgtcgtcgccaatccatgcttcaaacagatcgccaagaatatacagcgcgtcggccttgcgggcttcccccgctaaaaaacgcagaaaaccggcggtgatcgccggttcttccacgcagagatgaagatctgcaataaagagtgtcgccacgattactcgctaacggtcacgctttcaatgataacgtcttcttttggcacgtcctggtgcataccgctacgaccggttgcaacacctttgattttgtctaccacgtccatgccgtcaaccacttcagcaaacacgcagtagccccaaccttgcaggctttcgccagagaagttcaggaagtcgttatcaaccacgttgatgaagaactgtgcagttgcagagtgcggagcctgagtacgtgccattgccagcgtaccacgggtatttttcaggccgttgttggcttcgtttttgatcggttctttggtggctttttgtttcatgcccggttcaaaaccgccgccctgaatcataaagccgttgataacacggtggaaaatggtgttgttgtaaaaaccttcgcggcagtagtccaggaagtttttaactgtttcaggtgctttatcgtcaaaagttttgatgacaatatcgccgtgattggtgtggaaagtaaccatttttgcatcctgttccgtttgattggtgcttcaacccagttcgggtcatatatagggtggtgttatagcataaccgcacgatcggatcatcacgcaatgtatgctgattcgcgcgggaaatatgggtattatacgcaactcaattacccacacatgtctaaacggaatcttcgatgctaaaaatcttcaatactctgacacgccaaaaagaggaatttaagcctattcacgccggggaagtcggcatgtacgtgtgtggaatcaccgtttacgatctctgtcatatcggtcacgggcgtacctttgttgcttttgacgtggttgcgcgctatctgcgtttcctcggctataaactgaagtatgtgcgcaacattaccgatatcgacgacaaaatcatcaaacgcgccaatgaaaatggcgaaagctttgtggcgatggtggatcgcatgatcgccgaaatgcacaaagattttgatgctttgaacattctgcgcccggatatggagccgcgcgcgacgcaccatatcgcagaaattattgaactcactgaacaactgatcgccaaaggtcacgcttatgtggcggacaacggcgacgtgatgttcgacgtcccgaccgatccaacttatggcgtgctgagccgtcaggatctcgaccagctgcaggcaggcgcgcgcgttgacgtggtcgacgacaaacgcaacccaatggacttcgttctgtggaagatgagcaaagagggcgaaccgagctggccgtctccgtggggcgcgggtcgtcctggctggcacattgaatgtagcgcaatgaactgcaagcagctgggtaaccactttgatatccacggcggcggtagtgacctgatgttcccgcaccacgaaaacgaaatcgcgcagtccacctgtgcccatgatggtcagtatgtgaactactggatgcacagcgggatggtgatggttgaccgcgagaagatgtccaaaagcctgggtaacttctttaccgtgcgcgatgtgctgaaatactacgacgcggaaaccgtgcgttacttcctgatgagcggccactatcgcagccagttgaactacagcgaagagaacctgaagcaggcgcgtgcggcgctggagcgtctctacactgcgctgcgcggcacagataaaaccgttgcgcctgccggtggcgaagcgtttgaagcgcgctttattgaagcgatggacgacgatttcaacaccccggaagcctattccgtactgtttgatatggcgcgtgaagtaaaccgtctgaaagcagaagatatggcagcggcgaatgcaatggcatctcacctgcgtaaactttccgctgtattgggcctgctggagcaagaaccggaagcgttcctgcaaagcggcgcgcaggcagacgacagcgaagtggctgagattgaagcgttaattcaacagcgtctggatgcccgtaaagcgaaagactgggcggcggcggatgcggcgcgtgatcgtcttaacgagatggggatcgtgctggaagatggcccgcaagggaccacctggcgtcgtaagtaattgcgctattgccggatgcgagttttcgcatccggttatcgtctgcgccaccacaacattcccatcagtagcatccccggcaaccacacccacatcaattcagaaataatcacctgatgcccgtacggcgtggtgtaacgagacaatgcaaacggcgcgacttttatcacctgccagggagcgaaaaagcgttcatcactccacggccacagccagccaacgcctttaccgccagtggttacgctatccagcaagctgtggcttagcaagctgacggttaaaaacagccagcagcgaatcagcccagccctgaaccatcggcgtccaataaacacacataacagcgggacaacaaacgcaaacaccaggctatgggtaaacccgcgatgaccaaaaacattgccgtaagcaacgccaaatttaaagctcaatacgtcggcgtcgggcagcatcgccaggatgattccggcaaataacagacgcggagggatgactttgctacccaaccctaaaccaatgcataggggaacggcggcgtgcgtaataacggttggcatgatggtcgcttcggcaaaatgtcgatgctatcagcatggatgaacggggcgtagagggcaaaagtctgaaaagagaaccggcctgttgatacaggccgggaaagggatcaggcaacaacctgtacgctgtgacctgcaaaactcactgtctgaccggcgacgattttgcagcgtttgcgcgtttcaaccgcaccgtcgactttcacctggccttcggcaatcgcgattttcgcctgcgcgccgctttcgctccagccttccagtttcagcaagtcgcacagctcaacgtgcggatgtttacctaaagaaaatgtcgccatgttactcatcctgtggatcatgatattcaacgcacgcctgtagcgtgttttcaatcagcgtggcaaccgtcatcgggccaacgccgccgggaacaggcgtaatgtaactggcgcgtttagccgcgtcttcaaacacgacgtcgcccacaactttgccattttccagacggttgatgccgacatcaatcacaattgcgccttctttgatccagtcaccgggaataaagcctggcttgccaacggcaacgatcaatagatcggcattttctacgtgatgacgcagatttttagtgaagcggtgagtcactgtagtggtgcaacctgccagcagcagttccatgctcatcgggcggccaacgatattgcttgcgccaatcaccacggcgttgaggccgaaggtatcaatgttgtaacgctcaagcagcgtgacgataccgcgcggggtgcagggacgcagacgcggcgcgcgctggcacagacgaccgacgttgtaaggatggaaaccgtccacgtctttgtccggatgaatacgttccagcactttgacgttatcaatacccgccggtaacggcagttgaaccagaatgccatcgatggtgttgtcggcattcagcgtatcgataagctccagcagctccgcttcgctggtggtttccgggaggtcataagagcgggagacgaacccgacttcttcacaagccttgcgtttgcttgcgacataaatttggcttgcagggttactacccaccagcacaacggccagtcctggtgcccgcagtccggctgcaatacgcgcctgaactttttgagcaacttcagagcgcacctgctgcgcaatcgttttaccgtcaataatctttgctgccatcagagagaggattccatctgttacgtagatcgaaggggatgcgcctattttgtcagaagcggggcgcgctgtcaggtttcgtttcagatttatcgcgtgaagcgacctcttgcgaaggtgaggcgcaccgtcgctgagactgaaagcttcatttttcgtccatgatggcgttgtaaatctggaactgatttatttccttgtctaaggattaagataatttaagaaatacctgacaatataaaaagaattttcagcctggtaatttaccgcttcaggtctatatttgtgttgaatatattttgcgcggaagtattcatctaacggggctctctattttttagaatagagtgcatattttcaattaagacattcttagaggataaaaaggaatttactactatcagtgtcttaaataaagtaatcggttatatacggatgtggagtcgataaatgagattgaaggaatatatatgaaattaagatttattagctctgcgctggctgccgcactattcgccgctacgggtagttatgctgccgttgtagatggcggtacaattcactttgaaggcgaactggtgaatgctgcctgtagtgtgaatactgacagcgcagaccaggttgtcacactcggtcaatatcgtaccgatattttcaatgctgttggtaatacctctgcattaattccattcaccattcagttgaacgactgcgatcctgttgttgccgctaatgctgccgttgcattttctggtcaggctgatgcaatcaatgataatttattggccattgcatccagtaccaatacaacaacagcaacgggtgtcggtattgaaatacttgataatacatccgcaattctcaaacctgatgggaatagcttcagtaccaaccagaacttgatccccgggaccaacgttcttcatttttctgcacgttataaaggcaccggtacaagtgcaagtgcagggcaagcaaatgctgacgcgacttttattatgagatatgaataatcaaaaccacgttgttttgaattatatatcacgtcttataacaaagtaatgtaccggttgtctgaagcggtatggtggcaatgtaaatcgaaatcatgttcactttgtatcatgccgctttattaaatgaaaagggaatgatgtgttgtaagaaaccaaagcaatcatttctttatattccttatttttgccgtcaggaatacacaaggcgtattaactatgatgactaaaataaagttattgatgctcattatattttatttaatcattagcgccagcgcccatgctgccggagggatcgcattaggtgccacgcgtattatttatcccgctgatgctaaacagactgcggtatggattagaaatagccataccaatgagcgctttctggtcaatagctggattgaaaacagcagcggtgtaaaagaaaagagtttcatcattacaccgccactgtttgttagtgaacccaaaagcgaaaatactttgcgtattatttacaccggtccaccgctggcagcagatcgtgagtctctgttctggatgaatgttaagacgatccctagcgtagataaaaatgcattgaacggcaggaatgttttgcaactggcgattttaagccgcatgaaattatttctccgtccaattcaattacaagaattacccgcagaagcgccggacacactcaagtttagccgatccggtaactatatcaatgttcataatccaagtcctttttatgtcaccctggttaacttacaagtgggcagccaaaagttggggaatgctatggctgcacccagagttaatagtcaaattcccttacccagtggagtgcagggaaagctgaaatttcagaccgttaatgattatggtagtgtaactccggtcagagaagtgaacttaaactaaccgaatcatctgacaatatcagagctaattatgaaaatacccactactacggatattccgcagaggtatacctggtgtctggccggaatttgttatagttctcttgccattttaccctcctttttaagctatgcggaaagttatttcaacccggcatttttattagagaatggcacatccgttgctgatttaagccgctttgagagaggtaatcatcaacctgcgggcgtgtatcgggtggatctctggcgtaatgatgagttcattggtagccaggatatcgtatttgaaagcacaacagaaaatacaggtgataaaagtggtgggttaatgccctgttttaaccaggtacttcttgaacgaattggccttaatagcagtgcatttcccgagttagcccagcagcaaaacaataaatgcatcaatttactgaaagctgtacctgatgccacaattaactttgattttgcagcgatgcgcctgaacatcactattcctcagatagcgttgttgagtagcgctcacggttacattccgcctgaagagtgggatgaaggtattcctgctttactcctgaattataatttcaccggtaacagaggtaatggtaacgatagctatttttttagtgagctcagcgggattaatattggcccgtggcgtttacgcaacaatggttcctggaactattttcgcggaaatggatatcatagtgaacagtggaataatattggcacctgggtacagcgcgccattattccgctgaaaagtgaactggtaatgggagacggcaatacaggaagtgatattttcgatggcgttggatttcgtggtgtacggctttattcttctgataatatgtatcctgatagccagcaagggtttgccccaacggtacgtgggattgcccgtacggcggcccagctaacgattcggcaaaatggttttattatctatcaaagctatgtttcccccggcgcttttgaaattacagatttgcacccgacatctagtaatggcgatctggacgtcaccatcgacgagcgcgatggcaatcagcagaattacacaattccgtatagtacagtgccaattttacaacgcgaagggcgtttcaaatttgacctgacggcgggcgattttcgtagcggtaatagtcagcaaagtagccctttcttttttcagggtacggcactcggcggtttaccacaggaatttactgcctacggcgggacgcaattatctgccaattacaccgcctttttattagggctggggcgcaatctcgggaactggggcgcagtgagcctggatgtaacgcatgcgcgcagtcagttagccgacgccagtcgtcatgagggggattctattcgcttcctctatgcgaaaagcatgaacaccttcggcaccaattttcagttaatgggttaccgctatagcacacaaggtttttatacccttgatgatgttgcgtatcgtcgaatggaggggtacgaatatgattacgacggtgagcatcgcgatgaaccgataatcgtgaattaccacaatttacgctttagccgtaaagaccgtttgcagttaaatgttagtcaaagtcttaatgactttggcagcctttatatttctggtacccatcaaaaatactggaatactagcgatagtgatacgtggtatcaggtggggtataccagcagctgggttggcatcagttatagcctcagttttagctggaatgaatctgtagggatccccgataacgaacgtattgtcggacttaatgttagtgtgcctttcaatgttttgaccaaacgtcgctacacccgggaaaatgcgctcgaccgcgcttatgcctcctttaacgccaaccgtaacagcaacgggcaaaatagctggctggcaggtgtaggtgggaccttactggaaggccacaacctgagttatcacgtaagccagggtgataccagcaataatgggtacacgggcagcgccacggcaaactggcaggccgcttacggtacgctggggggcgggtataactacgaccgcgatcaacatgacgttaactggcagctgtctggcggtgtggtcgggcatgaaaatggcataacgctgagccagcctttaggggataccaatgttttgattaaagcgcctggcgcaggcggtgtacgcattgaaaatcaaactggcattttaaccgactggcgcggctatgcggtgatgctgtatgccacggtttatcggtataaccgtatcgcgcttgataccaatacgatggggaattccatcgatgttgaaaaaaatattagcagcgttgtgccgacgcaaggcgcgttggttcgtgccaattttgatacccgcataggcgtgcgggcgctcattaccgttacccagggcggaaaaccggtgccgtttggaagtctggtacgggaaaacagtaccggaataaccagtatggtgggtgatgacgggcaagtttatttaagtggtgcgccattgtctggtgaattactggttcagtggggagacggcgcgaacagtcgctgcattgcgcactatgtattgccgaagcaaagcttacagcaagccgtcactgttattagcgcagtttgcacacatcctggcagttaaaggaaattatcaataagataatctgcagattattattggcgatggcatgtttgtgtctggcaaacatatcctgggctactgtttgtgcaaatagtactggcgtagcagaagatgaacactatgatctcagtaatatctttaatagcaccaataaccagccagggcagattgttgttttaccggaaaaatccggctgggtaggtgtcagtgcaatttgtccacccggtacgctggtgaattatacataccgtagttatgtcaccaactttattgttcaggaaactatcgataattataaatatatgcaattacatgattatctattaggtgcgatgagtctggttgatagtgtgatggatattcagttccccccgcaaaattatattcggatgggaacagatcctaacgttagccaaaaccttccattcggggtgatggattctcgtttaatatttcgtttaaaggttattcgtccctttattaacatggtggagatccccagacaggtgatgtttaccgtgtatgtgacaagtacgccttacgatccgttggttacacctgtttataccattagttttggtggccgggttgaagtaccgcaaaactgcgaattaaatgccgggcagattgttgaatttgattttggtgatatcggcgcaagcttatttagtgcggcagggccgggtaatcgacctgctggtgtcatgccgcaaaccaagagcattgcggtcaaatgtacgaatgttgctgcgcaggcttatttaacaatgcgtctggaagccagtgccgtttctggtcaggcgatggtgagcgacaatcaggatttaggttttattgtcgccgatcagaacgatacgccgatcacgcctaacgatctcaatagcgttattcctttccgtctggatgcagctgcggcagccaatgtcacacttcgcgcctggcctatcagtattaccggtcaaaaaccgaccgaagggccgtttagcgcgctggggtatttacgcgtcgattatcaatgaggtacggagaatgagaagagtactctttagctgtttctgcgggctactgtggagttccagtggatgggcagttgaccctttaggaacgattaatatcaatttgcacggtaacgttgttgatttctcctgtaccgtaaacacagcggatattgataagacggtagatttaggcagatggcctacgatacaactactgaacgctggcgataccacggcactcgtcccttttagcctgcggctggagggatgtcctccgggtagtgttgcgattttatttacgggaacgccggcatccgataccaacctgctggctctggatgatcccgcaatggcacaaaccgtcgccatcgaattacgtaatagcgatcgctcccggctcgcactgggggaggcgagcccgactgaggaagtagatgcaaatggcaatgtcacactaaacttttttgccaattatcgagcgttagccagcggtgttcggccaggtgtggcgaaagcggatgcgatatttatgatcaattataattaatattatattaattcgtataatttggcgtagtcgataagctctacaatactatgcaaacctagcttgccataaatattagatttatgcgcactaactgttttattgctaagtaataacttatcggcaatttctttattagataatccgctaaccagataacgtaatatggtcacttcacgattagatagcacagtgaccgtactactattcgtactacatttattgctttttatatagttaagcgtttcgctgggaaaaaacgtgtatccggagaggatcatctgaacggcatgaaaaatatcattctgatcattgcatttactgacaaaaccgttagcaccagcttgtatcgctctgccagcataaaagcattcacttttgctacttaaaaataacactttcactgtgctctggatttgtttgatccttttcaggaaggtaaaaccgtctgttccgggcaagtctatatccataatgattaaatcaacaggacgggttcggagataatcgatggttatgcgataatcatccgttttcaggacaatctgcaattcactgtttttttgcaacagaacttcaatagacattctgatgataggatgagtatccataatgatcacgctcgttggtttcatagttaccagtctcataggagcggacaattttccgttaggtcgggaaattgtactttgatacatgaaaatacgggttttcttgattcagacgcgcagcggtgtgcgtttgtttgccgctatagcgaaataaatcagaaaatcagacgcggtcgttcacttgttcagcaaccagatcaaaagccattgactcagcaagggttgaccgtataattcacgcgattacaccgcattgcggtatcaacgcgcccttagctcagttggatagagcaacgaccttctaagtcgtgggccgcaggttcgaatcctgcagggcgcgccattacaattcaatcagttacgccttctttatatcctccataatttcagagtgggacatatttgggacattatcaccaaaaatgtcgtctattttcctcgcatgctctgtcaaatgattaggcgcaaggtgagcatacctacgaaccatttctatggactcccatccgcccatttcctgaagcactgataatgggacgcctgactgaatcagccagcttgcccaggtgtgtctgaggtcatggaaacggaaatcttcctcatttatgcccgtcttatccgtttccgctttgcccttcaccacatcactttttgtcgctgtttggcgagataattcaacggtgtcaggccgtaaaacgccttaaaaacagagataaagtagctcgtgctgctatagccacataattgcgccacctgagtgatatttttgttatccatcaataacatctgtacggcgtaacgcatacgacactctgtgacaatctggctatagctggtattttcgttttttaatttctttttgagcaggctggggcttaaacataggctactggcgacaattcgcagattccagtaatgctgaatatcgctttgaataatgcggcagacgctgtcgcggacgctgctgcgtaagatatacatcagtagggcaataaaccggctttgctcaagaaagttagacaatacggtaaaaagcaatgcgcgcgtcaactccgcttcgcagggtctgctgggttgctgcttgctgtggttggcggctagccggaacacttccggtgtacggctatgacaagcgataaccggggttgccagccggctccagggctttacacaggttaagttcttatttaaaaacaacagataatcgttgatgatgttacggttgatgtgggtgattaatacgtgatttaacgtactgagttcaatgacgttattgttgcacgcgaaggcggccaggtagtttttcggaagggtaaacgtagcatggttattgacgcttacctctacctctttttcggtcaggatcaccacgcaaggttcactgctgctcaattgcatttcgcactcctcagatatcagaaactccgctcaaaggatctatgcttcctgcatgagtgatcggcccgttcgccgataacgatcttctttctttagcacgctttttagcaattaatcttgatggaattctgatgagagcgaaagaggtaagccaggtcgtacccgacttacctggaggagatttaatactcgagaatgccgtgcgcgacgggcaaatagcgcagagagaaatagagagtgtctttaccgcaagaggaacgtttcgctaacaggctggcaatttctgcgtccggtttcggtttcgctgtaaaggttttgcctttgccggcgacaaaaagttcataaacaacgccgctggcaggggcgggactttggcaatcggcgctggcctgtaaataacgttcacgctgttcagcggtcagtttatccacgccgctgccatcctgtacccagacattaacgccggttgctttaacgtgttccagcagttggcgatagccatcggggctcatgtttccggcgaaaaaactactgatataaaccggttttgcactaacatcgctaatcagccgctgcgcgttgtttaaccatgttagcaaaggctgacgggcggcttcgctgcgccagttcaggtcgtcaatttccgcgctgatgtaccagccatccggcgttatgccaggcgcggcgctccataatctggcttgctggagatcggcagccagcaggcgattaagatagctttccagcgctgcggagctctgtttctggtgcataaaaaattccggatcggcgttcagcccgacaataagcttcagaccagcctgttgcgcagctgcggcccgcttaaacaataacgtgcgctgttctggctgggtaaatgcatcgccgtaacgggtccattgcaaaacaagggtatcgaagccttgcaaacgtaactgactcatcagcccctgccactgggtatcggtaacctgactatctcggttttgtggttgccagataatacctttcatcgcaaaggaaaaagggctgaccaaaagcagtgtcagcaatacgaaaatgaacttacgcatttaccagtgcactccaatggtgagaaacgcgttgttgcgctctccgttacgttgattaatcgccttaaaggtatgttgatactcgacgccgagactgactttgtgcggccaggcgtcgtagtgcgtctcgccggtccagatattccagcggaccccgactccgccaagctgcgcgccctgagtgcctttatcacgatagccgttgtcctgaacgtgagcgtaaggctcaatagtctgtccgttagctaccttctgatgccagctgacgcgataatctgccgtccacgcctgaatatcctggcggatatattgcgccgcatcgaggtacaggttttgggcaaaccagccactaccgttcgggtgccattcgtcgctgtatttgccgccattaaagaaactggcgctggcgcgcagcatggtatcggatgcgccattttggccgttcagcggcaactgctgttcgacggcgatgaaaaagatctgatcgcgcagcggcttccagcgcagaccggtgccggacatcggatttttcaccggcatcatcaccccgttttctccggtatcggcaaagacgcggctataaacactgagcaggtcgccttccagcagcatattgcgtccgatgcggtactcggcttccagttgtccgtagctacgatagcttttccctggcgctgcgccgccgacattattgttagcggtactcattgcgccggaacgcaagccgatggaagaatcgaaactgaacgtccagcggcgaccgacctcctcatgcaaacggcggaaattgaagcgttgttgattttgttctggggtcagtggggttatcagcgcctgattatcaatgtcatcaatcaccagccgggcgtagtgctgcgtcgcaggcatgtcatccagacgctggttcacgtaggccagttgtcggatcagtgccggatcgtccggaagccctttatgcgccggttcgagcatttcccggctctgtgcgatatcaccgctatcccacaaggcgtaaccaagcgctgcctgggtgttgctattattcggttccagttccagcgcggcgcgcaaatcactcaccgcggccgggacattatgacgttggcgataaattgtcgcccgcgcaacgtaagcgttggcagaaggcgcaatattgatactgcgcgtgagatcgttcagtgcgagttccggctgaccaggaatgtaacgttgcgcatgcagccaccagtagagggcattgcttcccagtccacgtttttctgcctgttgtagccagcgatcgcgagccgcaccatttcctgccgcctgggcggtattggcagcagcaagcagatcctcattgctcatgtcgtgaagactgattttctgccaggccgccagtgcggtggcgtagtcctcaacctgatacgcctgataggctaccgcacgatgttgccaggcgctcggttgtcgttgttcggcctgaagccatgcatacaacgccacaccgggtagcgtgtcccgataacactttgccagacggttccaggcggcggcatcgtaggaagggctcatatcgcccagcaagcgaactattgccgggcaattatctgcaatacccggcaactgactttgccactgacgttgctccgccagcggtaagggtttgcttaaaatcgccaccttcgccggcgttgccaggtaaggatgactttccagcagagacgccagtcgcgccattaaagtctggctgacacgcgcatcgccctggaaaggatagcgttgcagcaataaatcggcagcttcgcgactctgctcgttctgcatcagttgccaggttagttgatccaggcgggtaagatttgccggttcttgctgatacagcaatcgtgccagacgcagagcttcagccttgttacgggtcgccacgctgacagcataacgctcctcaagcatttcattggcggggagggtggcgagcagtttttgcgctgcgtcgtactgaccttcttttaacagcaccggtagcgtcgcgccaacaacatactggcggttgtcggcaaactgtaccgtataattcgccaacgcctgaacggggttagcgctgtatttagataacagatagagccaacttttctcttgtgcgtccgtggtaaatagtggcttattttcaatgagataatgctggaggcgtgctttttcgccacgataagccagcgcggtcgcgtaagtaatataactctgaggatcggtgaagatcccctgactttgcagtgccaggatccgatcgtccagctgcccggcaagaagcacgtcaaaccactgacggcgttctgccgcgcttaatgtgttctgctggcgtgcttcattgtatagcgtatctgcctgggaccattgtttcaggtagattgcccgttgcagcagatcggttcgcagcgtttttccttccgggcttgcagcaaacgtcgcatcgttcagttgcgctctggcgacaggtaactgtgccagccgcagggcattctgcccgacttcactgcgacaacgcagggtcggcgcagcatcgcacgctttttgctgggcaagcagttcttcaactgtcgtaacgcttttcacttcaaccggaatagccgccagactgcgctcaagtcgggcatctcctgggtgacgtttcagttgatcctcaagcaacagccgcgcccggtcatcatgaccaaaatggcgataggcttccgcaaggtataaagtcagcggaatattatccggcacctgctggtgtatatattcaaattcgcggatggcggttgcttcgtcgttatttttctgtgccttcagcgctttatcgagacggggataaataacaaaatggcgataatcgctcagccccagctcttctgcgctggtgccgatattgtctgcgagtgcgctggtactcaataaagacgtcagcagtaaaccagaccatccgatgacgcgattaaggttattctccttcattttcggactccagttgcgcaacctgttctgtgtttaaacctgctttgagtaatagactttgcatgctaacttgtaattcgcgttgaattgtcaggacgcgatccaacgtttcctggctgataacgccttcggtgaccaaaaacttgccgagcggcagagaactgcgttcatggcgcaataacaacacgttaattgcactacgattaatatgaccgagcgtggtcagtatttcggcgaacaggaactgatgcggcacatattgccgccagatttcaccggcctgctgttccgtgagccactgatgctgaaccgcattgtacaacattgcccgcggatcgtgaccgcgtcggcgtgcataccagtgacgtaaccctgtgacaatttgtccccgcagaacaatgacgtaacgcactttgcgtccgactttacgcgtcagggccgccaggctaaccgggtcaataccatcttcactgccgacaattaactcgtcattttccagacgcagcggcagtaccgcataatgcagcgccacggaggccggcatttcggcaatcaggctggaagggatctgccaggcatcgatggattcccacgccacgccgttttgctctgccagcgcctgtgccagctgctcggcgctaatcagcccctgcatcagcatactaccgcccaggcgtagaccttcgacgcgattacgcagtgctgtatcgagttgttcttcagtgatgacctgattttccagcagaatttgacctaacgggcgcaagctgcgggtatcgccagtcacgctggggaagtcatgcgttgttttatcccacgccacgcgacgtggatcgccgtgttgaagtacctgttttagcgcgcgccagttggccatgaagttaatcaggttgccccagaaaagacgcaggacggaaagcagcccctgcgtcaggccgtagtagccagtaacgaaaatcacccgctgcacgatgcggttaaccatcaaaccaaagtttagccacagcagggtcattaaccatgcgctgccgctgaaaatagaaaggaaatgccaggcatcgggccacaaactttcatacgccagcaacagcaaaagctggatcatcaccagcatcgcgaggaagctgacaaagttactgattgcccctttgcggtcgcgccagagaaagtagttcagcgtcaggctggaggtccatttatgggttttaaagccttggaaaacaatgccgatgatccagcgggatttttgtcgaaccgcagtgctaaaggtatcggggaaatattcgcgcacgcagatcatgttacttgtccgcgcgtgctgtaaaaatttacgctgctcgcgttctttggcttcgtccaccaccggaaaacggacaaaaatttccgtcatacctttttctttcaggcggaagccaatgtcgtaatcttcagtaagactctgcacgtcgaaagcaataccgtcaccgtcagctaacagtgcggtcacggcgcggcggctgaaacaggtgccgacgcctgcgctgggcacttgtccggcgagggcttcacgcaccggaacatctttgccatgcagctcactaaactcatcaatgtaagtcatgctggtgaagtgcgtccattcgcgttcgaacggatacaccgggatctgaatcagatctttacgctcgaccagatagttgaacagacgcaattccatcggactaatcacatcttcggcgtcatgcagaataaaaccagcaaaagcgaaattggcgctacgctcaaattgggtgatggcgtccagcacgttgttcagacagtcggctttgctggtggggccaggacgcgcgcagactaccttatgcacattcgggaagcgagcgcacacttcgtcaacatcacgctgagtatcggggtcgttggggtaggtgccaacaaagatatgatagttttcgtagtcgagcgtggtcgccgccagctcggccatattgccgatgacgcccgtttcattccacgccggaaccataatcgctaacggtttttcatctggtttatacagttcgcggtaactcattcgcgggtagcggcgataaacactcaacttgcgtttaatgcggcgtacccagtagacgacatcaataaaaaaatcgtccagcccgctgatgaacatgatgaccgctaacgttatcgcgattacttttaagccgtagagccaggtagcaaaaacatcaagaagccagtccacacaaaaaccttacattaacgctggttatgtttagggtggcgtatattaaggttttttatgaattgtgacagctttttaccattaataggtatgactattgcggcacgttatttttacactggttataaaagttgccgtttgctgaaggattaagcgggtaatgtgataacaaaccttgtcccccgcgcatcgctcgttaccgcaaccgtgcctttatgcgcgacaacaatgcttttcactatcgccaggccaataccgctaccttcaccttttcgctggcgggaggggtcaacgcgatagaaacggtcaaacaatcgcggtaagtgctcgggcgcaatgggcgtaccggggttttcgacgataacttgcaccaggtgatcgaccgtctgacagcgcactacaattgtctctccggttggcgtataacgcagggcgttgctaagcaggttgcttagcgcccgacgcagcatcagcggatcgcccgcgacctgacacttgtcgccaacaaaccgcaactccacgccgcgatcttccgctaacgcctcgaaaaaatcgaacactttgccgacttcatccgccaggttgagcattttcttttcggggattagctggttgttatcggcctgagcgagaaacagcatatcgctgaccattttcgccattcgcgtcagctcttcgagattagagtagagcacatcttccagctccttctggctgcggctctggctgagggcgatttcggtttgcgttatgagattcgtaattggtgtgcgaatttcgtgagcgatatccgcactgaaattggactggcgggtaaagacatcctcaatacgctcgatcatatggttgaagctcagtaccagctgttccagctcaatgggcacggtctgcgggtcgaggcgaacgtcgagatctttgctggtaatattctggatttgacggctgacgctgcggatcggcgcgtgacctttatgtaccgccaacagtacgataaagacgatcaggatgctgattacgcttgcggtcataataagtttattcatcaaatcatttatgtaatgaagatgaaaatcgatgctaagcgcgatgtagagcgtataaatcggtttgccgtccaccaacgggccaaccggcaagttaatcatccgccagttgctgtgttccatatgcccgtgaccgtggcctggcatcatcatcgtcgggccggaaaggagatacacctcgccaccctgagcgtctttatcgggtatggcgtcacgcgtaaactcgcggatatccggcgcaccgggggagtgatacaccgttttaccctgactatctgccagggaaatcaacacattggaataaccactgacgatatcttccagcgtcattaagcgtcgggcttgcgtttcgtcagggtgatttagtacccgttcaagggtggcgctaatctcttttaaatcattaatatcctgctcggcaaaatgaacttttacactgtggatcatgatccatgcaaaggcgaaaaacgccgcgatggtggccaggctgataaaaaaggtcaggcgggttgccaggctaaacgggcgctgaaatggcttactgaccatccggcacctcaagcatgtaacccacgccgcgcacggtctgaattagcttcggctcaaagtcgttgtcgattttgccgcgcagccgcttcaccgccacatcaatagcattggtatcgctgtcaaaattcatgtcccatacctggctggcgataaggctgcggggcagcacttcgccctgatggcgaaggaagaactccagcagagtaaactctttactggtcaaagtgatgcgcgtgccgctgcgggtgactttgcggctgacgagatcgaccatcaaatcggcaacctgaaactgactttcgataatcaccgccgccccgcgccgcagtaatgtgcgcacccgcgccagcagttcagcaaaagcgaatggcttcaccaggtagtcatctgcccccaactccagccccttgacgcgatgttcaatggtgccaagcgcggtaagcaacagaatcggcatccctttattggcggagcgtaacatgcgcacgatatcccagccgttcacgtccggcagcataatatcgaggattatcagatcataatcaccggtcatcgccagatggtagccattcagcccgttgtcggccaaatcgaccacaaaaccggcttcggttaaccctttggtcaagtattctccggttttcttttcatcttcgacaatcaacagtttcatatttcctccgcatgttgcccgggcaattctagagtagcgggatcagatggcaatcgcttattggcaaaatgacaattttgtcatttttctgtcaccggaaaatcagagcctggcgagtaaagttggcggcataaaatcaccagaaattatgagcctatgtctccttgtaaacttctgccattttgtgtggcccttgcgctaaccggttgtagtctggcaccggattatcagcgtccggcaatgcccgtgccgcagcagttcagtctcagccagaacggcctggttaacgcagcagataactatcagaacgcgggctggcgcaccttttttgttgataatcaggtgaagacgctgattagcgaggcgctggtgaataatcgggatttgcgcatggcgacgctgaaagtgcaggaggcacgggcgcaatatcgtctgaccgatgccgaccgctacccacagctcaatggcgagggcagcggcagctggagcggtaatcttaaagggaataccgccacgacacgggagtttagcaccggccttaacgccagctttgacctcgattttttcggtcgcttaaagaacatgagcgaagccgagcgacaaaattatttagccactgaggaagctcagcgcgcggtgcatattctgctggtttctaatgtcgcgcaaagctatttcaatcagcaactggcgtatgcgcaattgcaaatagccgaagaaacgctgcgtaattatcagcagagttatgcgtttgtcgaaaaacaactgttgacaggtagcagtaatgttctggcgctggaacaggctcgcggggtgatagaaagtacccgcagcgacatcgctaaacgtcagggggaactggcgcaggcgaataatgcattgcaactgttgctgggaagctacggcaagctgccgcaagcgcagacagtaaacagcgacagcctgcaaagcgttaaattaccggcgggattgagcagccaaatcttattgcagcgcccggatattatggaagctgaacacgcgttaatggcggctaatgccaatattggcgctgcacgcgcggcattttttccgtctataagcctgaccagcggaataagcaccgccagtagcgatctaagcagtttatttaacgccagcagcgggatgtggaattttatacccaaaattgagatccccatttttaatgccggacgcaaccaggccaatctggatatcgccgaaattcgccagcagcagagcgtggtgaattatgaacagaaaatccagaacgcctttaaagaagtggcagatgcgctggcattacgtcaaagcctgaacgatcaaattagcgcccagcagcgttatctggcaagcctgcaaattactttgcaacgggcgcgggcattatatcagcacggcgcagtaagttatctggaagtgctggatgccgagcgttctttatttgcaacccgacaaactttacttgatctgaattatgcccgtcaggttaacgaaatttctttgtataccgcacttggtggcggttgacagcaatatactcgtcatacttcaagttgcatgtgctgcgtctgcgttcgctcaccccagtcacttacttatgtaagctcctggggattcactcgcttgtcgccttcctgcaactcgaattatttagagtatgacttttaactccaggagagaataaatgaaaaaagcactgcaagtcgcaatgttcagtctgtttaccgttattggctttaatgcccaggctaacgaacatcatcatgaaaccatgagcgaagcacaaccacaggttattagcgccactggcgtggtaaagggtatcgatctggaaagcaaaaaaatcaccatccatcacgatccgattgctgccgtgaactggccggagatgaccatgcgctttaccatcaccccgcagacgaaaatgagtgaaattaaaaccggcgacaaagtggcgtttaattttgtccagcagggcaacctttctttattacaggatattaaagtcagccagtaacccaggtttaatgagatgaaaaaaatcgcgcttattatcggcagcatgatcgcgggcggtattatttctgcggcaggttttacctgggttgcaaaggcggaaccgcctgcagaaaaaacgagcaccgcagaacgtaaaatcttattctggtacgacccaatgtatcccaatacgcggttcgataaaccaggtaaaagcccgtttatggatatggatctggtgccgaaatatgccgatgaagagagttctgcgtctggtgtgcgcattgacccgactcagacgcagaatctgggggtgaaaacggctaccgtcacgcgcggaccgctgacttttgcccagagtttcccggcgaatgtcagttacaacgagtatcagtatgccattgtgcaggctcgcgctgccgggtttatcgacaaggtgtatccgcttaccgtgggcgataaagtacaaaagggcacaccgcttctcgacctgaccattcctgactgggtggaagcgcagagtgagtatttactgctgcgcgaaaccggcggtacggcgacccagactgaaggcattcttgagcggctgcgactggcgggaatgccggaggcggatattcgccgcctgatcgccacgcaaaaaatccagactcgctttacgctcaaagcgcccattgatggcgtgatcaccgcgtttgatctgcgcgcgggaatgaatatcgccaaagataacgtggtagcgaaaattcagggtatggacccggtgtgggtcactgctgcgatcccggagtctatcgcctggctggtgaaagatgccagccagtttaccctcaccgttccggcgcgaccggataaaacactcaccatccgcaaatggacgctgctacctggcgtggatgccgcgacccgcacgctgcagctgcgtctggaagtcgacaacgccgacgaggcgctaaaaccgggcatgaacgcctggttgcaactcaacaccgccagcgaaccgatgctgctcattccgagtcaagcgctgattgataccggcagcgaacagcgggtgattaccgttgatgccgacgggcgctttgtaccgaaacgcgttgctgttttccaggcaagccaaggcgtcaccgcattacgctctggtctggcggaaggtgaaaaggtggtttccagcggcctgttcctgattgattccgaagccaatatttctggcgcactggagcggatgcgctctgaaagtgcgacccatgcgcattgagggaataaccaatgattgaatggattattcgtcgcagcgtggcgaaccgttttttggtgctgatgggcgcgttgtttctgagcatctggggcacctggaccatcattaatacgccagtggatgcgctgccggatctctccgatgtgcaggttattattaaaaccagctatcccggtcaggcaccacaaatcgttgaaaatcaggtgacttatccgctaaccaccaccatgttgagcgtgcctggcgcgaagactgtgcgcggtttcagtcagtttggcgactcttatgtgtatgtcattttcgaagatggcaccgatccgtactgggcgcgtagccgggtgctggagtacctcaaccaggtacagggtaagctgcctgcgggagtcagcgccgagctggggccagatgccacgggtgttggctggatctatgaatatgcactggtggatcgcagcggtaagcacgatctggccgatttacgcagtttacaggactggtttctcaaatatgagctgaaaaccatccctgacgttgcggaagtggcgagcgtgggcggtgtggtgaaagagtatcaggtggttatcgatccccagcgcctggcgcagtatggcatcagtctcgccgaagtaaaaagcgcgctggatgctagtaaccaggaagcgggcggtagcagcatcgaactggcggaagcggaatatatggtgcgcgccagcggctatctgcaaacgctcgacgactttaatcacatcgttttaaaagccagtgaaaatggcgtgcccgtttatctgcgcgatgttgcgaaggtccagattggcccggagatgcgccggggcattgccgaactaaacggcgaaggcgaagtggcgggcggggtggtgatcctgcgatccggcaaaaacgcccgagaagtgatcgccgccgtgaaggacaaactggaaacgctgaaaagtagtctgccggaaggcgtggagatagttacaacatacgatcgcagccagctcattgaccgcgccatcgacaacctcagcggcaagttgctggaagagtttattgtggtggcggtagtctgtgcgctgtttctctggcatgtgcgcagcgcgctggtggcgattattagcttgccgctggggttgtgtattgcttttattgtcatgcacttccagggactgaatgccaatattatgagcttgggtggcattgcgattgccgtcggggcgatggtcgatgctgctatcgtcatgatcgagaatgcgcataaacggctggaagagtggcagcaccagcatcctgacgccacgctggataataaaacgcgctggcaggtgatcaccgatgcgtctgttgaagtggggccggcgctatttatcagtctgctgattatcacgttgagctttatcccgatcttcaccctggaagggcaggaagggcgtctgtttggcccgttggcgttcaccaaaacgtatgcgatggcgggtgcggcgctgctggcgatcgtagtgatcccgatcctgatgggctactggatccgtggcaaaattccgccggaaagcagtaacccgctcaatcgctttttgattcgtgtttatcatccgctgttgctgaaagtactgcactggccgaaaaccacgctgctggtggcggcgcttagcgtgctgacggttctctggccgctcaataaagttggcggggaatttttaccgcagatcaatgaaggcgacttgttgtatatgccaagcacgctgccggggatttccgcagcagaggcggcgagtatgctgcaaaaaaccgacaagctaattatgagcgtacctgaagtggcgcgggtatttggcaaaaccgggaaagcggaaaccgccaccgattctgctccgctggagatggtagaaacgaccatccagcttaagccgcaggagcagtggcggccaggcatgacgatggacaaaatcattgaggaactggataacaccgtgcggctgccggggctggcgaatctgtgggtgccgccaattcgtaaccgtatcgatatgctcagtaccggcattaaaagccccatcggcattaaagtttccggcactgtgctggcggatatcgacgcgatggctgagcaaattgaagaagtagcgcgaacggtgccaggcgtagcttctgcgcttgccgagcggctggaaggtgggcgctatatcaacgttgagattaaccgtgaaaaagccgcacgttacggtatgacggtggcggatgtgcagttgtttgtgacttctgcggtgggcggggcgatggttggcgaaacggtggaagggattgcccgttatccaattaatctgcgttatccgcaaagctggcgcgatagtccgcaggcactgcgccagctgccgatcctgacgccgatgaagcagcaaatcaccctggcagacgtggccgacattaaagtctctaccggaccgagcatgctgaaaaccgagaatgcgcgcccgacgagctggatttatatcgatgcccgcgatcgtgacatggtgagcgtggttcacgatttgcaaaaagcgatagctgaaaaagtgcagttaaaaccgggcaccagcgtggcattctccgggcagttcgagctactggagcgcgccaaccataagcttaaactcatggtgccgatgacgttgatgattatcttcgtgctgttgtatctggcgttccgtcgggtgggcgaagcgttgctgattatcagcagcgtaccgtttgcgctggtgggcggcatctggttgctgtggtggatgggctttcatctttccgtggcgacgggcactggctttatcgccctcgccggggtcgccgccgaatttggcgtggtgatgctgatgtatttacgtcacgccatagaggccgtgccgagcttgaataatccacaaacattcagcgagcagaagctggatgaggcgttatatcacggcgcggtcctgcgcgtgcgcccgaaagcgatgacggtggcggtgattatcgccggtctgctgccgattctgtggggaacgggggctggtagtgaggtgatgagccggattgccgcgccgatgattggcggcatgatcaccgcacctttgctgagcctgtttattatcccggcggcgtataagctgatgtggctgcaccgacatcgggtacggaaataaaagcaggataccccgtttaaccgtgtggattgtgtcttgcgacgatgggcactaaatgttaaaaggtgcccctcaacaaaaaagacacacaggggaaaggcgtgaaaaacgcgagtaccgtaagcgaagatactgcgagcaatcaagagccgacgcttcatcgcggattacataaccgtcatattcaactgattgcgttgggtggcgcaattggtactggtctgtttcttggcattggcccggcgattcagatggcgggtccggctgtattgctgggctacggcgtcgccgggatcatcgctttcctgattatgcgccagcttggcgaaatggtggttgaggagccggtatccggtagttttgcccactttgcctataaatactggggaccgtttgcgggcttcctctctggctggaactactgggtaatgttcgtgctggtgggaatggcagagctgaccgctgcgggcatctatatgcagtactggttcccggatgttccaacgtggatttgggctgccgccttctttattatcatcaacgccgttaacctggtgaacgtgcgcttatatggcgaaaccgagttctggtttgcgttgattaaagtgctggcaatcatcggtatgatcggctttggcctgtggctgctgttttctggtcacggcggcgagaaagccagtatcgacaacctctggcgctacggtggtttcttcgccaccggctggaatgggctgattttgagcctggcggtaattatgttctccttcggcggtctggagctgattgggattactgccgctgaagcgcgcgatccggaaaaaagcattccaaaagcggtaaatcaggtggtgtatcgcatcctgctgttttacatcggtagtctggtggttttactggcgctctatccgtgggtggaagtgaaatccaacagtagcccgtttgtgatgattttccataatctcgacagcaacgtggtagcttctgcgctgaacttcgtcattctggtagcaagcctgagtgtgtataacagcggggtttactctaacagccgcatgctgtttggcctttctgtgcagggtaatgcgccgaagtttttgactcgcgtcagccgtcgcggtgtgccgattaacagcctgatgctttccggagcgatcactagcctggtggtgttaatcaactatctgctgccgcaaaaagcgtttggtctgctgatggcgctggtggtagcaacgctgctgttgaactggattatgatctgtctggcgcatctgcgttttcgtgcagcgatgcgacgtcaggggcgtgaaacacagtttaaggcgctgctctatccgttcggcaactatctctgcattgccttcctcggcatgattttgctgctgatgtgcacgatggatgatatgcgcttgagtgcgatcctgctgccggtgtggattgtattcctgtttatggcatttaaaacgctgcgtcggaaataaggcattcacgctacatccgacaaaacgatgtcaaccatccgaaaccgctctcatccattcgatgagagcggtttttttaattactgcttaaatgcacccgccagagagcgaatatcattgccggttggcgagtaatccccgcatatccggttgtcaggtcaggatggtaaggcacctgctttacactttcgcccgtggtcagtgatggctgcgggcgaatcgtaccagatgttgtcaattaatcgtgttggcacagcgttatgactatcttttcttttatctgccagtgcacagcaaacatctcattctcacgatgaatgatgacctgctgtttattccagctaattatctgatagtccagaaaacctgcatcagtttggatctcacttgccttaaatgcgctctctttggcggaaaatgccagtgtcagcgccagagaaaaggctaaaccgcagtctgcgagtcgctcgtgttccgctggtgtaataatgttgtctgtcaattctcttgcggtttgtacagaaaaaatttcttctatatcaatgccaatcggttgacgagataccacggctaatgccgtagtcccacagtggctaatactgccgtatacctccgcaggccagacaggttggcgtagctcgccgattgcgggcacacatttatagccatattcccgcaaagcataaacagcagcgatccgtccggctaaatgctctgttttacgtttacgtccagcgtgttgcagttgtgcgtagtgcggcagccagagtaaatcctgctcacaaaaattcgccggatcgaactcaacaaaatgcagcgtatgtccggcaaaggggagggaggtatgcgtagttttcatatcgaccatattcgagactgatgacaaacgcaaaactgcctgatgcgctacgcttatcaggcctacatggtcctgcaatatattgaattggcaagatttttgtaggccggataaggcgttcacgccgcatccggcatgaacgacgcgcactttgtcaacaatctgacgttagcatcagaagtgggtgtttacgctcatataccacgtacgtcccggctcgttataggtatacgccccggcaccggcgatatagttggcccctgccgaatcgcccgtggtctgggcattacccgcacgccacaaacgtttgtcgaacagattgtccacgccgccggtcagactgacattcttcgtcacatcccaggtcgcgctcaggccaacaatgctgtaaggactaatttctttggtttccggtccaaccgctggctgacctttatagttgtacttcttcggctgctgcttgccgtaccaggtgaaggtcgtttgcatgctcaaatcttcccgtgcctgccagctcagcgtactgttcaacgtatactccgggatgatgctcaaacggtcgcccgtggttttgttttcactcttcagcatataagtgatgttattggtccacatcaccgtttcgctaaccggtacgtttaagcttccttccagaccttcaaccaccgctttcggcacgttatcccactgatagagatcggtgccgactgcgttttgccctacagccacatagcccgcttcaatcttattgcgataatcgttacggaaccaggtgacgcccgccagccacccgtcgcgtttgaactccagaccaatctctttgttgatgctggtttctgctttcaggtcatcgttaccttgcagatagcagccgcccgcgctggcatagcaaccctgacctttactgtagagaatgtagttcgggttagtctggtacaggctcggcgctttataagcacgggcgatgcccattttcagcgtgaagtcatcgcctaaaccttggcttatgttcagcgccgggctccagttattgccgacaatactgtgatgatcgaaacgcagccccggcgttacgatggtgctgtcagtcagctccatgttgttttcggcaaacaggctgaaaatttctgctttactatacgggctacggtcggtggtactcacgccatcaatagcgccaccggtattcgttccggtcagtgcctgggtgttggaacttaagtccttcatccgttgctgattccactccgtacccagcgtcagcgtctggttaacgaggaaatcaatcggcaggttaacttcgctgtgcagcatcacgtcatcaagatcgatatcgacgaaatcctgtgtcgctttttcgttaaatttcccttcggtaccgcccgccagaccttccggaatacggctgttacgggtgtgttcgtactgcacccagttgctggtggtcacgccgttatcccagccaccgttccaggtcagcgcgtagttctggcgatacagacggttggtttcatcgccatatttgctgcgggtataggaatcggagttggtattctgggtgtcgcccgcatacaggttaccctggcggctgtaacctgcttccagttccaggctttgcaatggcgcgaaatcccagcgcaccacgccattaatatctttgttgattaccccttcgcgcccggctggtaacgtcgtggcatacgttccggcacgcgcggactgatggccctggttgatatcccacgcgtcagcctgggttttgtcgaggttgccatacaaacggaagctgaattcgtcgcccagcggaccggtcaggctaaagttagtgcgtttggtggcaccttcctctttatgttctggcgcattgaaatatgcgtcccaggagccgtgccactcgccgctgccttttttggtaatgatgttaaccacgccgcccgccgcgccgttgccataacgcgcagctgccggaccacgcagaacttcaatacgttcaatcatttcaggtggcacccaggaagtatcaccacgggtatcgcgctcgccacgccagccctgacgcacgctgttacggctgcttaccggcttgccgtcaatcaaaatcagcgtgttttccggacccataccgcgaatatcaatctgtcggttattcccacgctgaccactggtggagttaccggtcaggttaacgcctggcatggtacggatgatcttgctcacatcgcgggcaaccgggtttttgcggatttcatctgcggtgatggtgctaacgccaggcgcctgtaagttctgctcggcggcggtaacgacaatagtatcgtcatgactaacaggagtatcggtcggctcttgtgcctgcgctaccccataaatccccagattgaccaacaaggccagggaatgaatcttcttgttcattgttttattcctgcatttttgccacgaattgcaactgtcgggcatggtcgtcatcaacacgacgcatcccgctaccgcgaaaacctttgatcctgaaagacacgcagtgcagttggttaattaatgtccgcgcttcccacggcgcgccattacgctattgcaaatgcaaatagttatcaataatattatcaatatatttctgcaatcaatgaaaaattgcacagtaaacatggggttatggtgtgacggcgttaaaagtaggaagtgagagctggtggcagtcgaaacatggcccggaatggcagcgtctgaatgacgaaatgtttgaggtcactttctggtggcgtgatccccaaggttctgaagaatacagcacgataaagcgcgtatgggtctacatcactggtgtgaccgatcaccatcagaacagccagccccagagcatgcagcgaattgcaggcactaacgtctggcagtggacgacacaactcaatgccaactggcgcggcagctactgctttattcccaccgaacgcgatgacattttttctgtaccatcccccgatcgcctcgaattgcgcgaaggctggcgaaaactattaccccaggcgatagccgatccgctgaacctacaaagctggaaaggcgggcgagggcacgctgtttctgcactcgaaatgccgcaagcgcctctgcaaccgggatgggattgtccgcaagcgccagaaatacctgccaaagaaattatctggaaaagtgaacggttgaaaaagagtcggcgtgtatggatttttaccaccggcgatgcaacagcagaagaacgcccgctggcagttttgctcgatggcgaattttgggcgcaaagtatgcccgtctggccagtgctgactagcctgacccatcgtcagcaacttcctcccgccgtgtatgtgttgatcgacgctatcgacaccacgcaccgcgcccacgaactgccgtgtaatgcggatttctggctcgcagtacagcaagagttattacccctggtgaaagctattgccccttttagcgatcgtgccgatcgcaccgtggttgccgggcagagttttggtgggctttccgcgctgtatgccggactgcactggcctgaacgctttggctgtgtattaagccagagtggaagctactggtggccgcatcggggcgggcagcaagagggcgtgttacttgaaaagctaaaagctggtgaagttagcgccgaaggtctgcgcattgtgctggaagcgggtattcgcgagccgatgatcatgcgggccaatcaggcgctgtatgcgcaattacaccccataaaagaatccattttctggcgtcaggttgacggcggacatgatgcgctttgttggcgcggtggcttgatgcaggggctaatcgacctctggcaaccacttttccatgacaggagttgaatatggcattcagtaatcccttcgatgatccgcagggagcgttttacatattgcgcaatgcgcaggggtaattcagtctgtggccgcaacaatgcgtcttaccggcaggctgggacattgtgtgtcagccgcagagtcaggcgtcctgccagcagtggctggaagcccactggcgtactctgacaccgacgaattttacccagttgcaggaggcacaatgagccagcatttacctttggtcgccgcacagcccggcatctggatggcagaaaaactgagtgaattaccctccgcctggagcgtggcgcattacgttgagttaaccggagaggttgatagcccattactggcccgcgcggtggttgccggactagcgcaagcagatacgctgcggatgcgttttacggaagataacggcgaagtctggcagtgggtcgatgatgcgctgacgttcgaactgccagaaattatcgacctacgaaccaacattgatccgcacggtactgcgcaggcattaatgcaggcggatttgcaacaagatctgcgcgtcgatagcggtaaaccactggtctttcatcagctgatacaggtggcggataaccgctggtactggtatcagcgttatcaccatttgctggtcgatggctttagtttcccggccattacccgccagatcgccaatatttactgcacatggctgcgtggcgaaccaacgcctgctagcccatttacgcctttcgctgatgtagtggaagagtaccagcaataccgcgaaagcgaagcctggcagcgtgatgcggcattctgggcagaacagcgtcgtcaactgccgccgcccgcgagtctttctccggcacctttaccggggcgcagcgccagcgcagatattctgcgcctgaaactggaatttaccgacggggaattccgccagctggctacgcaacttagtggtgtgcagcgtaccgatttagcccttgcgctggcagccttgtggctggggcgattgtgcaatcgtatggactacgccgccggatttatctttatgcgtcgactgggcagcgcggcgctgacggctaccggacccgtgctcaacgttttgccgttgggtattcacattgcggcgcaagaaacgctgccggaactggcaacccgactggcagcacaactgaaaaaaatgcgtcgtcatcaacgttacgatgccgaacaaattgtccgtgacagcgggcgagcggcaggtgatgaaccgctgtttggtccggtactcaatatcaaggtatttgattaccaactggatattcctgatgttcaggcgcaaacccataccctggcaaccggtccggttaatgaccttgaactggccctgttcccggatgtacacggtgatttgagtattgagatcctcgccaataaacagcgttacgatgagccaacgttaatccagcatgctgaacgcctgaaaatgctgattgcccagttcgccgcggatccggcgctgttgtgcggcgatgtcgatattatgctgccaggtgagtatgcgcagctggcgcagctcaacgccactcaggttgagattccagaaaccacgcttagcgcgctggtggcagaacaagcggcaaaaacaccggatgctccggcgctggcagatgcgcgttacctgttcagctatcgggaaatgcgcgagcaggtggtggcgctggcgaatctgctgcgtgagcgcggcgttaaaccaggggacagcgtggcggtggcactaccgcgcagcgtctttttgaccctggcactccatgcgatagttgaagctggagcggcctggctaccgctggataccggctatccggacgatcgcctgaaaatgatgctggaagatgcgcgtccgagcctgttaattaccaccgacgatcaactgccgcgctttagcgatgttcccaatttaacaagcctttgctataacgccccgcttacaccgcagggcagtgcgccgctgcaacttagtcaaccgcatcacacggcttatatcatctttacctctggctccaccggcaggccgaaaggggtaatggtcgggcagacggctatcgtcaaccgcctgctttggatgcaaaatcattatccgcttacaggcgaagatgtcgttgcccaaaaaacgccgtgcagttttgatgtcagcgtgtgggagtttttctggccgtttatcgcaggggcaaaactggtgatggctgaaccggaagcgcaccgcgacccgctcgctatgcagcaattctttgccgaatatggcgtaacgaccacgcactttgtgccgagcatgctggcggcatttgttgccagcctgacgccgcaaaccgctcgccagagttgcgcgacgttgaaacaggttttctgtagtggtgaggccttaccggctgatttatgccgcgaatggcaacagttaactggcgcgccgttgcataatctatatggcccgacggaagcggcggtagatgtcagctggtatccggcttttggcgaggaactggcacaggtgcgcggcagcagtgtgccgattggttatccggtatggaatacgggtctgcgtattcttgatgcgatgatgcatccggtgccgccgggtgtggcgggtgatctctatctcactggcattcaactggcgcagggctatctcggacgccccgatctgaccgccagccgctttattgccgatccttttgccccaggtgaacggatgtaccgtaccggagacgttgcccgctggctggataacggcgcggtggagtacctcgggcgcagtgatgatcagctaaaaattcgcgggcagcgtatcgaactgggcgaaatcgatcgcgtgatgcaggcgctgccggatgtcgaacaagccgttacccacgcctgtgtgattaaccaggcggctgccaccggtggtgatgcgcgtcaattggtgggctatctggtgagccaaagcggcctgccgttggataccagcgcattgcaggcgcagcttcgtgaaacattgccaccacatatggtaccggtggttctgctgcaacttccacagttaccacttagcgccaacggcaagctggatcgcaaagccttaccgttgcctgaactgaaggcacaagcgccagggcgtgcgccgaaagcgggcagtgaaacgattatcgccgcggcattcagcagcttgctggggtgtgacgtgcaggatgccgatgctgatttcttcgcgcttggcggtcatagcctactggcaatgaaactggcagcgcagttaagtcggcaggttgcccgccaggtgacgccggggcaagtgatggtcgcgagtactgtcgccaaactggcaacgattattgatgctgaagaagacagcacccggcgtatgggattcgaaaccattctgccgttgcgtgaaggtaatggcccgacgctgttttgtttccatcctgcgtccggttttgcctggcagttcagcgtgctcagccgttatctcgatccacaatggagcattatcggcattcagagtccgcgccccaatggccccatgcagacggcggcaaacctggatgaagtctgcgaagcgcatctggcaacgttacttgaacaacaaccgcatggcccttattacctgctggggtattcccttggcggtacgctggcgcagggtattgcggcgcgactgcgtgcccgtggcgaacaggtggcatttcttggcttgctggatacctggccgccagaaacgcaaaactggcaggaaaaagaagctaatggtctggacccggaagtgctggcggagattaaccgcgaacgcgaggccttcctggcagcacagcagggaagtactagtacggagttgtttaccaccattgaaggcaactacgctgatgctgtgcgcctgctgacgactgctcatagcgtaccgtttgacggtaaagcgacgctgtttgttgctgaacgcacacttcaggaaggtatgagtcccgaacgcgcctggagcccgtggatagcggagctggatatctatcgtcaggattgtgcgcatgtggatattatctctccagggacgtttgaaaaaattgggccgattattcgcgcaacgctaaacaggtaaattaatattatttataaacccataattacagaaaataattatgggttttttatttgtttgatttataggtttgatgaatatttctcttaaatagagtgaatgttgcattcagtggaaggaatttacaaacttcagcttcggataattatcaccaactggtaaagtgagcgccgtggagatttccccctattggactcattttcaggttataccccatgagtagtctgaatattaaacagggaagtgacgctcattttcccgattatcctctggcgagccccagtaataatgaaattgatttacttaatctaatcagtgttttatggcgggccaaaaaaacggtcatggcggtcgtttttgcgtttgcctgcgcaggcttgctgatctctttcatcctgccgcaaaaatggaccagcgcggcggttgtcacgcctccagaacctgttcagtggcaagagttggagaaaagtttcactaagcttcgtgtgctggatctggatatcaaaattgatcgtacagaagcatttaacctgtttatcaagaagtttcagagcgttagcttgctggaagagtacctgcgtagtagtccttatgtgatggaccaattaaaagaggcgaaaatcgacgaactggatttgcatcgcgcaattgtcgcattgagcgaaaaaatgaaagcggttgatgacaatgccagtaagaaaaaagatgaaccgagtctgtatacctcctggacgctaagttttaccgcgccaaccagtgaagaggcgcagaccgttttgagcgggtatatcgattatatctctacgttggtggtgaaagagagcctagaaaacgtccgtaataaactggagatcaaaacccagtttgaaaaagaaaaactggctcaggatcgcattaaaacgaaaaatcaacttgatgcaaacattcagcgcctcaattatagtctcgacattgccaacgcggcaggaattaaaaagcccgtttacagtaatggtcaggccgttaaagatgaccccgatttttctatttctctcggtgcagacggtattgaacgcaaactggaaatagaaaaagcggtcactgacgttgcggaactgaacggtgaattacgtaatcggcagtatcttgtcgagcaattaacaaaagcacatgtcaacgatgtgaattttacgccgtttaaatatcagttaagcccgagtttgccagtgaaaaaagacggtccgggtaaggcgattattgtgatcctttccgcgttgatcggcgggatggtggcttgtggtggcgtgctgttgcgctatgcgatggcatccagaaaacaggatgccatgatggcagaccacttagtttaactatttgcggtactaggtgccgttcgtccgagcggcaccacaagcggcgttccggcaactggatcgtcaatgatcatgcagcgcagaccataaatgcgctcaatcagttcagcagtgacaatctccttcggcgctccctgagcaacaattttcccttcccgcaatgcaatcaaatggctggcgtaacgacaggcctgattaagatcgtgcagcaccgccgccagggtatagcctttttcgcggttcagttcgcttaacaactccagcaaatcaatctgatgactgatatccagccaggtcgtgggttcgtcgagcagcataattgccgtttcctgggccagcaccatcgcgatccacgctcgctggcgttgtccgccagaaagggtatccacgctttgatctgccagatgagttattcccgtggcctgcattgctttcgttaccgcttcttcatcctctttgcgccagcgggtaaacagcggttgatgcggataacgtccacgcgccaccagctcctgcacggtgatatcgcccggcgtggtagcattttgcgccaacagaccaatccggcgtgcaacctctttactggcgtaatgttgaatgtgctcgccatccagccagacatgcccatgagcaggcgtcatcaggcggcttaaggtacgcagtaacgtggatttaccgcagccatttggcccgataattgccgtgaagtgaccatcaggtatttctacagtcagattttccgcaacggtatatttgccatatcccagggttaactgttcgccgcgcaaacgggctacactttcggtcattttttgcgagactcctgaattaacaagacgataaggtaaataccgccgaggctgacggtaacgacgccaaccggaagttgatacggcataaacagttgttgggcgcagagatcggccgccagcagtaacagcgccccgcatagcgccgcctgggttagcccccagcgagcggtgccgctaatgcgtcgggcaatgtgcggtgcgactaaagcaataaaggaaatcggcccggcaagcgctgttgccgcagcggtaagcaccactgcaaccagcatcattaacagacggctacgttcgacgctgacgcccagcgcacacgcggtatcatcgcccatttccagcaagcgcatccggcgtaccagtaaggcggcggcaatgagcatcaatataatgatgggtgcggaagggctggtttttgcccacgtcaggccgttgaggcttccggcattccacaaacctgctgttagcgccgtttctaaagacgctttcagcaacagccaggtattaaaggccaccagcatggcgcgaacgccgataccgataataatcaaccgaaaggtgtcgatgccgttgcgccaggcgagcagccagaccagcaggctagtgacaatgccgcccaccattgcactcagcgcgatagccgtcaggtcctgaccaaacagcaccatcgccaccagcacgccgctccacgccccggtgttaaagcccattacgtcagggctgccgagcgggttacgcatcaggctctgaaaaatcgcgccactgacgcccagtgctgcgccaatcaacagcgccatcagcacgcgtggtaaacgccattcggtgaccaccatcgtcatactgcgcggcgcatcgcccatcagcgcggcgaatacctggctggtttccagcgtgacggcaccgctgcgtaatccccagatacctgcaaccacacaggcggaaaccagcagcaaacaggtgatgagtaatcggcgagagacgtaaatcatgcaccacctcgcgttttacgtcgcacgaggaagatcagcaccggtgcaccaataaacgcactgaccacagaaacgcgcagttcgccgggcacaatcacccgcccgatgatatcggcaaacagcagcagggcaggggtagcaagtagcgtgacgggcaggctccagcgatgatcggcacccaccagccaacgcgccatatgcggcatcatcaggccaataaaggcaatcgggccaactattgccgtcgcactaccacaaagcacggtaatcgccagcagaccaatcaactgtgtgcgcgccacgcgactgcccagcgccgtcgcggtgtcgctgccgaggctcaaactgttcagcgcgcgactcagtaatagcgcagttgctccggcgatcagcaccgggatcagcaccacttttaaggtatgtagattgcgaatatccaggctaccggcttgccagaaacgcaactgatcgtagacgtcaggattaagcagggcgatgccgctggtcagtccttccagcaccgccgccagcgccacgcccgccagggttaaacgcaccggacttaactgcccgccgccctgactgccggtaaaggcaacaatcaaactggccaccagcgccccggcgaaggccatcgccagttgttcctgcgcggaagagtaaccaaacagcgccgcacccagcacaatggcaaagctggctccggcgttcacgccaagcaagccggggtcggcaagtgggtttcgggtgagggtttgcattaacgccccggcaaggccaagcgcgccgcctgccagtaaaccggcaagggtacgcggcagccgcgcgtcgagcacgatggtgcagtcggcgctctggcaggtgccggagaaggcctccagcactacggaagcggggagactttttgccccaatgagcaggcttaatgccgtcgcgataatcagtaataacagcaatccgggcacggcaatggcgcgtgtcacggcaacagaaccagacatacgaacttccatgataatgaaattaattatcgttatcgatcttatttggatatgttagcatgtgcagcctaagaataggtatttaaaatatttgatggcaaggcattgtaatgaataaacaatcctggctgcttaacctcagcctgttgaaaacgcacccggcgtttcgcgcagtattcctcgctcgtttcatcagtattgtgtctctgggtttgctcggcgtcgcggtgccggtgcagatccagatgatgacacattccacctggcaggtggggcttagcgtgacgctgaccggcggcgcgatgtttgttggcctgatggtcggcggtgtgctggcggatcgctatgagcgcaaaaaagtgattttgctggcgcgcggcacctgtggcattggcttcattggactgtgccttaatgcactgctgccggagccgagtttgctggcaatctatttacttggtttatgggatggttttttcgcaagccttggcgttacggcgctattggcggcgacaccagcactggtagggcgtgaaaacttaatgcaggccggggcgatcaccatgttgaccgtgcgtctggggagcgtgattagccccatgattggcggtttattgctggcgaccggtggcgtagcctggaactacgggctggcggcggcgggcacgtttattaccttgctaccgttgttaagccttccggcgttgccaccgccaccgcagccgcgtgagcatccgttgaaaagtttactggcaggatttcgttttctgcttgccagcccgctggtgggcgggattgcgctgctgggtggtttattgacgatggcgagcgcggtgcgggtactgtatccggcgctggctgacaactggcagatgagtgcggcacagattggttttctctacgcggcgatcccgctcggcgcggctattggtgcgttaaccagcgggaagctggcacatagtgcgcgaccagggttattgatgctgctctccacgctgggaagcttcctcgccattggtctgtttggcctgatgccgatgtggattttaggcgtggtttgtctggcgctgttcggctggttgagtgcggtcagcagcttgctgcaatacacaatgctgcaaacgcaaaccccggaagcgatgttagggcggattaacggtttgtggacggcgcagaacgtgacgggcgatgccataggcgcggcgctgctgggtggtttgggcgcgatgatgacaccggttgcttccgcaagcgcgagcggttttggtttgttgattatcggcgtgttgttattgctggtgctggtggagttgcgacattttcgccagacgccgccgcaggtgacagcgtccgacagttaatgcttaaaacagcgccttaagcctatccagcacttgcatggcgctgtagtaatccagacggaacgtctcggttcccagcgcataaacctgcttgttttgtactgcaggcaggtgcgcgagcagcggattagcataaatagcatcggcatctttctgatcaccggcgaacaggaatagactctcgccatttaaccctgcagccagattttccccaccaagctgaatgatgtcatggcgtttaccctgactttggctggcatttaaccctgcgggtaacttcgccagcgtaaagccgagttgttccagcatctgcccttgtgcactttctggcgtccagagattggcactgtgtgcagcggcagtatagacaatggcagtgaccggctgcggcggtaatttgatttgctctttcgccgccgccagttgcttatcaaactgcgcaatccgctctgccgcttgtttctcatgcccggtaatttcgccaagttgcgttaacaggctctgccagcttttgtcgtcgtaattgatgattaatgtcggggcgatggtggaaagctgatcatacagtgccagcgcgctatccccgccggttgcgctaattaaaatcagatccggcatttgcgcggcaacggcttcggcgctcggttcgccgatatagagccgttgcagtttgcgttctttcgccaccttgctccactggcgtaaaaagccctggtcatccgcgacgcggttattcggcgtggtcgcgccgctggcgatcaccggagcatcaatcgccagcagactgccggtcagggtgacgctggtggaaacaatacgctgcggctggctttccagtgtatgtgtgccacggctgtcagtaatctgacgcggccagtcagcggcctgaactgcggctattccactaagcaaaagtcctgttaatagaagggcgttgcggtagagcggggcgagtctcacaaatcagcttcctgttattaataaggttaagggcgtaatgacaaattcgacaaagcgcacaatccgtcccctcgcccctttggggagagggttagggtgaggggaacagccagcactggtgcgaacattaaccctcaccccagccctcaccctggaagggagagggggcagaacggcgcaggacatcacattgcgcttatgcgaatccatcaataatgcttctcattttcattgtaaccacaaccagatgcaaccccgagttgcagattgcgttacctcaagagttgacatagtgcgcgtttgcttttaggttagcgaccgaaaatataaatgataatcattattaaagcctttatcattttgtggaggatgatatggatacgagtctggctgaggaagtacagcagaccatggcaacacttgcgcccaatcgctttttctttatgagcccgtaccgcagttttacgacgagtggatgtttcgcccgcttcgatgaaccggctgtgaacggggatagccccgacagtcccttccagcaaaaactcgccgcgctgtttgccgatgccaaagcgcagggcatcaaaaatccggtgatggtcggggcgattcccttcgatccacgtcagcctagcagcctgtatattcctgaatcctggcagagcttctcccgtcaggaaaaacaagcttccgcacgccgtttcacccgcagccagagcctgaatgtggtggaacgccaggcaattccggagcaaaccacgtttgaacagatggttgcccgcgccgccgcacttaccgccacgccgcaggtcgacaaagtggtgttgagtcggttgattgatatcaccactgacgccgccattgatagtggcgtattgctggaacggttgattgcgcaaaacccggttagttacaacttccatgttccgctggctgatggtggcgtcctgctgggggccagcccggaactgctgctacgtaaagacggcgagcgttttagctccattccgttagccggttccgcgcgtcgtcagccggatgaagtgctcgatcgcgaagcaggtaatcgtctgctggcgagtgaaaaagatcgccatgaacatgaactggtgactcaggcgatgaaagaggtactgcgcgaacgcagtagtgagttacacgttccttcttctccacagctgatcaccacgccgacgctgtggcatctcgcaactccctttgaaggtaaagcgaatagccaagaaaacgcactgactctggcctgtctgctgcatccgacccccgcgctgagcggtttcccgcatcaggccgcgacccaggttattgctgaactggaaccgttcgaccgcgaactgtttggcggcattgtgggttggtgtgacagcgaaggtaacggcgaatgggtggtgaccatccgctgcgcgaagctgcgggaaaatcaggtgcgtctgtttgccggagcggggattgtgcctgcgagcagtccgttgggtgagtggcgcgaaacaggcgtcaaactttctaccatgttgaacgtttttggattgcattaaggagcgaggatgagcattccattcacccgctggccggaagagtttgcccgtcgctatcgggaaaaaggctactggcaggatttgccgctgaccgacattctgacgcgacatgctgcgagtgacagcatcgcggttatcgacggcgagcgacagttgagttatcgggagctgaatcaggcggcggataacctcgcgtgtagtttacgccgtcagggcattaaacctggtgaaaccgcgctggtacaactgggtaacgtcgctgaattgtatattacctttttcgcgctgctgaaactgggcgttgcgccggtgctggcgttgttcagccatcagcgtagtgaactgaacgcctatgccagccagattgaacccgcattgctgattgccgatcgccaacatgcgctgtttagcggggatgatttcctcaatactttcgtcacagaacattcctccattcgcgtggtgcaactgctcaacgacagcggtgagcataacttgcaggatgcgattaaccatccggctgaggattttactgccacgccaagtcctgctgatgaagtggcctatttccagctttccggtggcaccaccggcacaccgaaactgatcccgcgcactcataacgactactactacagcgtgcgtcgtagcgtcgagatttgtcagttcacacaacagacacgctacctgtgcgcgatcccggcggctcataactacgccatgagtagcccaggaagcctgggcgtctttcttgccggaggaacggttgttctggcggccgatcccagcgccacgctctgtttcccattgattgaaaaacatcaggttaacgttaccgcgctggtgccacccgcagtcagcctgtggttgcaggcgctgatcgaaggcgaaagccgggcgcagcttgccagcctgaaactgttacaggtcggcggcgcacgtctttctgccacccttgcggcgcgtattcccgctgagattggctgtcagttgcagcaggtgtttggcatggcggaagggctggtgaactacacccgacttgatgatagcgcggagaaaattatccatacccagggttacccaatgtgtccggatgacgaagtatgggttgccgatgccgaaggaaatccactgccgcaaggggaagtcggacgcctgatgacgcgcgggccgtacaccttccgcggctattacaaaagtccacagcacaatgccagcgcctttgatgccaacggtttttactgttccggcgatctgatctctattgatccagagggttacatcaccgtgcaggggcgcgagaaagatcagattaaccgtggcggcgagaagatcgctgccgaagagatcgaaaacctgctgctgcgccacccggcggtgatctacgccgcactggtgagcatggaagatgagctgatgggcgaaaaaagctgcgcttatctggtggtaaaagagccgctgcgcgcggtgcaggtgcgtcgtttcctgcgtgaacagggtattgccgaatttaaattaccggatcgcgtggagtgtgtggatagtcttccgctgacggcggtcgggaaagtcgataaaaaacaattacgtcagtggctggcgagtcgcgcaagtgcctgaaggagagaacacgatggctattccaaaattacaggcttacgcactgccggagtctcacgatattccgcagaataaagttgactgggcctttgaaccgcaacgtgccgcgttgttaatccatgatatgcaggactattttgtcagcttctggggcgagaactgcccgatgatggagcaggtgatcgcgaatattgctgcgctgcgcgactactgcaaacagcacaatatcccggtttattacaccgcccagccgaaagagcagagcgatgaagatcgggcgctgttgaatgatatgtgggggccgggcctgacccgcagcccggaacagcaaaaggtggtggatcgcctgacgccagatgccgacgacacggtgctggtgaagtggcgctacagcgcgtttcatcgttctccgctggagcaaatgctgaaagagagtggacgtaaccagctgattattaccggggtatatgcccacattggctgtatgaccaccgcaaccgacgcatttatgcgcgatattaaaccgtttatggtggcggatgcgctggccgatttcagccgtgacgagcatttgatgagcctgaaatatgtggccggacgttctggccgggtggtgatgactgaagaattactgccagcacctatccccgccagcaaagcggcgctgcgtgaggtgatcctgccgttgctggacgagtccgatgaaccgttcgatgacgacaacctgatcgactacggtctggatagcgtgcgcatgatggcgctggcggcgcgctggcgcaaagtgcatggtgatatcgactttgtcatgctggcgaaaaacccgaccatcgacgcctggtggaagctactctcccgcgaggtgaaataatggatttcagcggtaaaaatgtctgggtaaccggcgcaggtaaaggtatcggctacgccacggcgctggcgtttgttgaggcgggagcgaaagttacaggttttgatcaagcgttcactcaggagcaatatccctttgcgaccgaagtgatggatgttgccgacgctgcgcaggtcgcgcaagtgtgtcagcgactgttagctgaaacggagcgactggacgcgctggtcaatgcggcgggaattttacgcatgggcgcgaccgatcagctcagtaaagaggactggcagcagacttttgcggttaacgtcggcggtgcgtttaacctgttccagcaaaccatgaaccagtttcgccgtcagcggggcggggcgattgtcactgtggcgtccgacgccgcgcacacgccgcgtattggcatgagtgcttatggcgcaagcaaagcggcgctgaaaagcctggcgttgagcgtcgggctggaactggcgggtagcggcgtgcgctgtaatgtggttagccctggctccaccgacaccgatatgcaacgcacgctgtgggtgagcgatgacgccgaagaacagcgtattcgcggctttggcgagcagtttaaactcggcattccgctggggaaaatcgcccgtccacaagagatcgccaacacgattttgttcctcgcctctgacctcgccagccatattaccctacaggatattgtggtcgatggcggcagtacgctgggggcataagcatgatctggaaacgccatttaacgctcgacgaactgaacgccaccagcgataacacaatggtggcgcatctgggaattgtgtatacccgtctgggcgatgatgtgctggaagccgaaatgccggttgatacccgtactcatcagccgttcggtttactacatggcggcgcgagcgcggcgctggcggaaacgctgggaagcatggccggatttatgatgacccgcgacggacagtgtgtggtaggcacagaacttaatgcaacacaccatcgcccggtgtctgagggaaaggtacgcggcgtctgccagccgctgcatcttggtcggcaaaatcagagctgggaaatcgtcgttttcgatgaacaggggcggcgttgctgcacttgtcggctgggtacggcagttttgggatgaacccgacagaattagatgagattgcaggaaaactcggttaacggagtgatcgagttaacattgttaagttaaatattggtttcaactccgatttacatggttgctgtgttgttaaattgtacaaagatgttatagaaacaaaatgtaacatctctatggacacgcacacggataacaactatgaacaaaagtgggaaatacctcgtctggacagtgctctctgtaatgggagcatttgctctgggatacattgctttaaatcgtggggaacagatcaacgcgctgtggattgtggtggcgagcgtctgtatctatctgatcgcttaccgtttttatgggctgtatatcgccaaaaatgtgctggcggttgacccgacgcgtatgacgccagcggtgcgccataacgacgggctggactatgtgccgacggacaagaaagtgctgttcggtcaccattttgcggccattgccggagcaggtccgctggtggggccggtactggcggcgcaaatgggctacctgccggggatgatctggctgctcgctggggtggttctcgccggtgcggtgcaggatttcatggtgctgtttgtttctacgcgccgtgacggtcgcagcctgggtgagctggtcaaagaagagatggggccaaccgccggggtgattgcgctggtggcctgctttatgatcatggtcattatccttgcagtgctggcgatgatcgtggtgaaagccctgactcatagcccgtggggaacatataccgttgcgttcaccattccgctggcgctgtttatggggatctacctgcgctatctgcgtccggggcgtattggcgaagtgagcgtcatcggtctggtattcctgattttcgccattatctctggcggctgggtggcagaaagtccgacctgggcaccgtactttgactttaccggcgtgcagttgacctggatgctggtgggttacggttttgtggcggcggtgctgccggtgtggttactgctggccccgcgtgactacctctctaccttcctgaaaatcgggactatcgtcggtctggcggtaggcattttgattatgcgcccgacgctgaccatgcctgcgctgaccaaatttgtcgatggcactggcccggtatggaccggtaacctgttcccgttcctgtttatcaccatcgcctgtggcgcggtgtctggcttccatgcgctgatctcttctgggaccacgccgaagatgctggcgaacgaagggcaggcgtgctttatcggctacggtgggatgttaatggaatccttcgtggcgattatggcgctggtttccgcctgtatcatcgatccgggcgtgtattttgccatgaacagcccgatggcggtgctggctccggcagggacggcggatgtggtcgcttctgccgcgcaggtggtgagtagctggggctttagcattacaccagatacgctaaaccagattgccagcgaagtgggtgaacagagcatcatttcccgtgcgggcggtgcgccgacgctggcggtggggatggcctacattctgcacggcgcgctgggcggcatgatggatgtggcgttctggtatcacttcgccattttgtttgaagcactgtttattctgacggcggtggatgcaggtacgcgtgctgcgcgctttatgttgcaggatctgctgggcgtggtgtctcctggcctgaagcggaccgatagtctgcctgctaacctgctggcaacagcgctgtgcgtactggcgtggggctacttcctccatcagggcgtggtcgatccgctgggcggcattaacactctgtggccgctgtttggtattgccaaccagatgctggcagggatggcgctgatgctctgtgccgtggtgttgttcaagatgaaacgtcaacgttacgcctgggtggcgctggtaccaacggcctggctgctgatttgtaccctgaccgcaggctggcagaaagcgtttagcccggatgcgaaagtcggcttcctggccattgctaataagttccaggcaatgatcgacagcggcaatattccgagccagtatactgagagtcagctggcgcaactggtgttcaacaaccgtctggatgccgggttaaccatcttctttatggtggtcgtggtggttctggcactgttcagcattaagacggcacttgcggcattgaaagatccgaagccaacggcgaaagaaacgccgtatgaaccaatgccggaaaatgtcgaggagatcgtggcgcaggcaaaaggcgcacactaaagtcagagtgagggggggatgttggcgaatgttggcttagtgcccagggttccctctcaccctaaccctctccccggtggggcgaggggactgaccgagcgcgttgatagcatttgtaggccggataaggcgttcacgccgcatccggcactctttcagcaacatggttagcggaggccaagatgtttgatagtctggcaaaagccggaaaatatttaggtcaggcggcgaagctgatgattggtatgcctgattacgacaactatgtcgaacatatgcgggttaaccatcccgatcaaacgccgatgacctacgaagagtttttccgtgagcggcaggacgcgcgctacggtggaaaaggcggcgcgcgctgctgctaaatttgtacgtcaggctttaaagctttccacttttttgaacgctgcacgcaacgtatctggtgtcagcgtgactggcaggtaatgaatggactccaccggacgcagggtgtgggcaatcactttgtcgatctccgcctgattattgatatccacttccagctccgccagtgtagtcggcagatgaaaacgctgatacgctccagttaattgcgccagcacatcatcctgacccagcaaggcgctttgcaccagaattccgtaggcgactttggtgccgtggagaaacttctcggtttgcggcagcacggtcagaccgttatgcacggcatgagctgccgccacacgcgtaaaacgatcgcccagaccaccaaccatcccaccaccagcaataatagcatccaccacatcgcaaaaactttgcgttaactgttgattttgctgatcgctcagcgcctgttcgctactgtttaacaagacgtcgcgaatggcttgcgcattattgatccccagtcgcacggttagcggcaacgtttctggttgcggagccagcaccaccgcttcataccatttcgccagcgtgtcaccgatccccgccagcagatattgttgcggtgcattgaggataatctccggttccaccagcaccataaaattggcgtcgtcgaaaatctcataatgcagcgcctgtccggcatcattataccagacggagagcggtgtccaggcggcgcaggtggcggcgatcgtcggaacggcaacaaacggcagaccgagacggcgggcgagggctttcgcggtgtcgagcagtgcaccgccaccgacgccaatcaccacgctgcggtcgtcaccggactcagccgccagttgttgtacatcgctttcgctgcaatgaccgcgaaacaaaatatgctttgcccctggcagtccaaacgctggcggaagtttggtttgcgccgcagcaatggcgcgtttgccgtagatccacaccgcgcgagaaagttgttcatcagtgaaaaaatcgtgcaggtgattgaaacttcctggatgactaaagtagttagccgggccgacgaccacgcggataggattgtgaggcatgttgtgttgtccttattgttttatttagacatctaaacgtcttgattgccaaatactagcatcgtgttatagtgccttcaacacgcaacttcgtcaggtacaataaaaatgacaaataaccctctgattccacaaagcaaacttccacaacttggcaccactattttcacccagatgagcgcgctggcgcagcaacaccaggcgattaacctgagccaaggctttcctgattttgatggtccgcgctatttacaggagcggctggcgcaccacgttgcacagggggcaaaccaatacgcgcccatgaccggcgtgcaggccttgcgcgaggcgattgctcagaaaacggaacgtttgtatggctatcaaccagatgccgatagcgatatcaccgtaacggcaggggcgacggaagcgttatacgcggcgattaccgcactggtgcgcaatggcgatgaagtgatttgttttgatcccagctatgacagttacgcccccgccatcgcgctttctgggggaatagtgaagcgtatggcactgcaaccaccgcattttcgcgttgactggcaggaatttgccgcattattaagcgagcgcaccagactggtgatcctcaacactccgcataaccccagtgcaactgtctggcagcaggctgatttcgccgctttgtggcaggcgatcgccgggcacgagatttttgtcattagcgatgaagtctacgagcacatcaactttagtcaacagggccatgccagtgtgctggcgcatccgcagctgcgtgagcgggcagtggcggtttctagttttggcaagacctatcatatgaccggctggaaagtgggttattgtgttgcgccagcgcccatcagcgccgaaattcgcaaggtacatcagtatctgacctttagcgtgaataccccggcacagctggcgcttgctgatatgctacgtgcagaacctgagcattatcttgcgttaccggacttttatcgccagaagcgcgatattctggtgaatgctttaaatgaaagccggctggagattttaccgtgtgaaggtacatactttttgctggtggattacagcgcggtttctaccctggatgatgttgagttttgccagtggctgacgcaggagcacggcgtagcggcgattccgctgagcgtgttttgcgccgatcccttcccacataaactgattcgtctctgttttgccaagaaggaaagcacgttgctggcagcagctgaacgcctgcgccagctttaattatttaaccgtccaggcgcgggaatattgacggtcggcaaacaactcttgcaggccgttaatttgcttcaggcgcagcacttcgtcgctgtccattcccagctctttgccaattttattatcgtcccatcccaactggctaagttcacggacgatttcgctcatggcggtgatttgatggcgtccacgagcgcgattatgacgaatagtcgcggcgatgcgttgattacgcgtaccttccagacaggtcaccggcaaataaccttttaagcgtaattttaaactactactgcctttaccaatttcatggcggtgaaaaccatccacgatttccatggcatttttatccgtatgtgtgaccacaatgggttgggtaaaaccatctatttcaatggatttttgcagcagttttttttcgggtggtgccacgttgtttgggttgtaatcattaggcataagttggctgtttttaacccacagaacgcaatccactggctcttcacgaaaggggctaacctgatggatcgccatgcggatttcattaatcgctttgatgcgatcatcttccggcaagctggcgagaaattgcgttaaatcctgcgttaatcgttgttgcatagtatcccccattcctgacgttttccttttatccgttcgttataacgctgatagttcttgctttttgtggggctaaaacttaatgcccgacaccagtaatcgttattgagtaaaactttgcatatccgccgccaggaggggatatctttcgcgccaatgtccccttgctgggtttgtggaacctcgatgccttttttctgataccagtgcaaataaatggcgattttattgcggtaatgctcagctgttttttccggcatgctattgagcagcaataatgcatattcttgccagtctaaatgttctggcttgaggattttccgatgcccatagaaatgattgtcatgtccggcgtaaatgccgccactttttaccccgctgactcgtgcgcacatagcagcccagcgatccggttcgataacgtgatagagccataatccttgtcgttgctccgggccaaaaggttcgcaaattcgcatatgacgcagaggaacgcctgcctgatacattaggttatacagtgggttgcagagactttgatgatttgcataccaggtccagatatcagccactttccagtcgtaaatggggtaaatgtaccagctatgaccgcctggtgcggccgtagtccagggtttatcgtcggcaaaacgttgtttatttaaactggcgatggcgacaaaacggttgtaggactcatccgcacggatgccgatcatcatcgccgccggacgtttttgactaaaccattcggcaaactcacgtacaaattgttcgaaggtcatgcctggctggtaaaagcagaaaaagtcagggtcggttatcgcatcttggggaggttgacgtacccattcgacatcaggttcccagcactgccattcgggttggtattgactaagggaattttgcgtcgtaagcgggagcgcaacccagtaaaactcttcgatgacatcggtgtacaactcgcgcagggactgaacatagttaatggtgcaagagaattgcgcctcccagtcgataaacaaaacgcagatttttttgcccatttgtcgggcaagttcggctgtcagatgcagcattaaaccagagtctttgccgccagaaaaactgacacaaacgcggggtagggtgttgagtgtccaggtaatacgctctcgtgcagcttccagaatattgagcggaagaggaattttataaatagacatctgaagacgctctctgaacgttacagggtgatcagtgagataagtctgttaattataaagtaaacactgtaaagcagagtgttttatttttcattcgcgctgtgaataaatagatgaaagttatagtagctgtctgtagttatatatcaaaaactctcatttagacggtcaataaatcgggagaacaccaaattatttaaagaagatttattataggaaatgtaaagctttatactaggtaacggatgttctagttttatctcttttaagttaagaaagtcacggtaggaattataaagttcataggggactattcccagtaaatctgtaactgcaatgctattaatgattgtcagcaaagaggaaccacgaaaactgattttgcgattcataaatctctcgtctatttccatttgaatatcatcaacccctgcacttttagatattaattgggtgaactcttctgccataatttgttcataagtgctattgtcagtaattcgtggatgcctattactacaaattagagtattgcgaatcgtatgcaatggcatgcaaatgacggaacggctgatcactggcatttgggtgatcaccagatcggctttgcggtgaaccaacagttcttcagcattctctgcactcatgaggatatcatggcactcaatctcgacagaggaatcttgccgtaggcagcggatcagcatactattattagagcaagaaatgagctgagggccgtagataataaagtttttctttagttcggacttattgactatattaattgtttgttcaaggcctctgagatttttctcaagatggtgatgcagatttaaccctgttgtcgtcggcgcgataccttttccactgcgaatgaataaagggtcattaaattgcgcacgtaagcgttgtaagctctggctcacggcacttggggtgatatatagactttcagcagctttgctaatgcttaaatgctggtaaatacactcaaatatgacaagaagatttaagtcgaactttttcaagtcgtagagattggccatacactactccggttatatttttcttccatgatatattcacttaatcaatgttttttgcgtatatatttttattgattatgtttttttgcttaactcaggattaagtttttctaaaatagcacagccacttagggcagagcgagcaattcatgcttttttaggatggttgaaaagcagggatatagttcaaccatccatgaattaccttttatttattccccataatgatattaagcgttttctgatcgggcaaccccacggcctgttgtagcgtattttccttactcatgtaatagatagccggcgtgacatttgcccccagatcgtccatcagtttctcattgtcacttaacactttcatttgctctgtacttacgtttgcaggcacgtttagcttaagcttgccaccagaggcttcatattgttgccaggtttttgcgggatctttggaggcaagaattgccgctgctgtcgccgggctttctggcttgataaccccaaccaacaatgttcttaattgcactttgccagaatctacccacgggcgcgcctgctgccagaactgtttacaatatgggcagaacggatcggcgaagacgtagacaatgaccggcgcatcttttttaccgtcgaggagccagtgggattgttccatccgttgccacatttcgcgtccggctggtgcgtaaatttctttttcgataagtgtgttactcaggttttcacctttctcgttgtacatgtaaccagagatagcgtgcttaccatctggagtcaggtagatggtgacgcccatatcctgatactttccgagataacctttcattcctccgggggcatcgaatgttttgatgattgtaatgccctgtttttcaatcgcttttactggagcaggaagttcctctgcgaaggcgattgcaggaagcagagccagtaaaagtatcttttttaacattaatttgtccttttcagtcagtgcaaaagtcgagtaaaaggcataacctatcactgtcataggtaagagcttagatcaggtgattgccctttgtttatgagggtgttgtaatccatgtcgttgttgcatttgtaagggcaacacctcagcctgcaggcaggcactgaagataccaaagggtagttcagattacacggtcacctggaaagggggccattttactttttatcgccgctggcggtgcaaagttcacaaagttgtcttacgaaggttgtaaggtaaaacttatcgatttgataatggaaacgcattagccgaatcggcaaaaattggttaccttacatctcatcgaaaacacggaggaagtatagatgtccttgattaacaccaaaattaaaccttttaaaaaccaggcattcaaaaacggcgaattcatcgaaatcaccgaaaaagataccgaaggccgctggagcgtcttcttcttctacccggctgactttactttcgtatgcccgaccgaactgggtgacgttgctgaccactacgaagaactgcagaaactgggcgtagacgtatacgcagtatctaccgatactcacttcacccacaaagcatggcacagcagctctgaaaccatcgctaaaatcaaatatgcgatgatcggcgacccgactggcgccctgacccgtaacttcgacaacatgcgtgaagatgaaggtctggctgaccgtgcgaccttcgttgttgacccgcagggtatcatccaggcaatcgaagttaccgctgaaggcattggccgtgacgcgtctgacctgctgcgtaaaatcaaagcagcacagtacgtagcttctcacccaggtgaagtttgcccggctaaatggaaagaaggtgaagcaactctggctccgtctctggacctggttggtaaaatctaaatttccttcgtctttcacgccatagcggcgttggcgtcgcccgctcaccccggtcacttacttgtgtaagctcccggggattcacaggctagccgccttgctctgacgcgaaatacttcggaaattcacctaattcttcgggtgctgcggcacccgattttcttccccgcaccatgatgcaagctgcatccaggtagccgcagaggccgcttgcatgatgatgtttaaagcccaggagataaacatgctcgacacaaatatgaaaactcaactcaaggcttaccttgagaaattgaccaagcctgttgagttaattgccacgctggatgacagcgctaaaagcgcagaaatcaaggaactgttggctgaaatcgcagaactgagtgacaaagtcacctttaaagaagataacagcttgccggtgcgtaagccgtctttcctgatcaccaacccaggttccaaccaggggccacgttttgcaggctccccgctgggccacgagttcaccagcctggtactggcgttgctgtggaccggtggtcatccgagcaaagaagcgcagtctctgctggagcagattcgccatattgacggtgattttgaattcgaaacctattacagcctctcttgccacaactgcccggacgtggtgcaggcgctgaacctgatgagcgtactgaacccgcgcatcaagcacactgcaattgacggcggcaccttccagaacgaaatcaccgatcgcaacgtgatgggcgttccggcagtgttcgtaaacgggaaagagtttggtcagggccgcatgacgttgactgaaatcgttgccaaaattgatactggcgcggaaaaacgtgcggcagaagagctgaacaagcgtgatgcttatgacgtattaatcgtcggttccggcccggcgggtgcagcggcagcaatttactccgcacgtaaaggcatccgtaccggtctgatgggcgaacgttttggtggtcagatcctcgataccgttgatatcgaaaactacatttctgtaccgaagactgaagggcagaagctggcaggcgcactgaaagttcacgttgatgaatacgacgttgatgtgatcgacagccagagcgccagcaaactgatcccagcagcagttgaaggtggtctgcatcagattgaaacagcttctggcgcggtactgaaagcacgcagcattatcgtggcgaccggtgcaaaatggcgcaacatgaacgttccgggcgaagatcagtatcgcaccaaaggcgtgacctactgcccgcactgcgacggcccgctgtttaaaggtaaacgcgtagcggttatcggcggcggtaactccggcgtggaagcggcaattgacctggcgggtatcgttgagcacgtaacgctgctggaatttgcgccagaaatgaaagccgaccaggttctgcaggacaaactgcgcagcctgaaaaacgtcgacattattctgaatgcgcaaaccacggaagtgaaaggcgacggcagcaaagtcgttggtctggaatatcgagatcgtgtcagcggcgatattcacaacatcgaactggccggtattttcgtccagattggtctgctgccgaacaccaactggctcgaaggcgcagtcgaacgtaaccgcatgggcgagattatcattgatgcgaaatgcgaaaccaacgtgaaaggcgtgttcgcagcgggtgactgtacgacggttccgtacaagcagatcatcatcgccactggcgaaggtgccaaagcctctctgagtgcttttgactacctgattcgcaccaaaactgcataagaagaagtaagattcacctgcaattgcttagccgccggggtcaaacctggcggcttttttatggcattaaaaagccccgccgggatggctccgggcagggcgggatacttattctggcaattaacgcacaaccagcaccggcagattggcgtggcggatcacgctgctggcgttagaacctaacagatgggtgctaatgcttgggttgcgagaaccaataactacaacatcagcccccagttcttctgccaactcattgacttcatcccgcacgctaccaaaacggacatgttgtttaatgcgggaaggatcgatggtgaagtggctgaccatcgtttgcagacgttcttgtgcttcatgttgcagatgctcttcaaaacgacgcacatcagcggcaaaacggtgcaggctcaggctggcactcccgggtagtacgtgaagtagatgaataactccgtcatcctgggcgaggaattcagcgtggcgaacagctttgtcgctcaattccatttcaaatacatcaactggcataatgattgtcttatacataaccctttctccctgttaatcatgaacaaatcattcgccatgattataatatttatccctgatatttgtctggttctttttccttacgaactgtttctgtgatgaatatattctcactgaacaccaggaattctcccaaaacctgtggtaccgcccgttttcccgctgtgatagctacccttaaagactgactcttttttgaactgtctctggaggttgcatgaaagcattgacttatcacggcccacatcacgttcaggtagaaaatgttcccgatccgggcgttgaacaggcagatgatattattctgcgtattacggcaacggcgatctgtggctctgacctccatctttatcgaggcaaaatacctcaggttaaacatggcgatatttttggtcatgaatttatgggggaagtagttgaaaccggaaaggacgtaaaaaatttgcaaaaaggcgaccgagtggtaattccgttcgtcattgcttgtggcgactgttttttctgtcgattgcaacaatatgccgcctgcgaaaataccaatgcgggtaaaggcgctgcgctcaataaaaaacagataccagctccagcggcattgtttggttatagtcacctgtatggcggcgttcctggtgggcaggcggaatatgtccgcgtccctaaagggaatgtggggccgtttaaagtaccgcctttgcttagtgatgataaagcgcttttcctttctgatattctgccaacggcatggcaggcagcaaaaaatgcgcagatccaacaaggtagtagcgttgcagtctatggtgctggtcctgtgggattgttgacaatcgcctgtgcacggttgctcggtgcggaacagatttttgttgttgatcatcatccctaccgcttgcatttcgccgccgaccgctacggcgcgatcccgattaattttgatgaagacagcgatccggcacagagtattattgaacaaacggcaggtcaccggggcgtggatgcagtaatagacgccgtcggttttgaagcgaaaggcagcaccacggaaacggtgctgactaacctgaaactggagggcagcagcggtaaagcgttgcgtcagtgtattgcggcggtcaggcgtggcggcattgttagcgtaccgggcgtctacgctggatttattcacggtttcctgtttggcgacgcctttgataaagggttgagctttaaaatgggacagacccacgttcacgcatggctgggagaattattaccgttaattgagaaaggattactgaaaccagaagaaattgttacccactatatgccgtttgaagaggccgcccggggatatgagattttcgaaaaacgtgaagaggagtgccgtaaggtgattctggtacccggtgcacaaagcgcagaggcggcgcagaaggcggttagtggtctggtgaatgcgatgccggggggaacaatatgatcgtcaggagtggttttcgaggtaaaggacagccatgacgataatcgccgccataatcagaaatcctatcaggatgtaaaatgcttctgccatggttattcccacaaacgaaacggaataattttgcagcaaaagtgaacagtgagaaccaggaaaaattgctgattttgcgtaaagaggatgcgagtgcatcctctgggcaaagcgagttatcgcttgtgcagatgggattaaagcaggtagtcgccagcagcttctggctggtattcgagttccagcacttcaaggtgggttgcaacgccgcccggaagttcccagtgaatggaatcgccaacgcgcagccccagcagtgcggcacctaccggagccataacggaaagctgagtattgctatcggtcatttttgccggatacaccagcgtgcgcacacgcacttcgccatcgctaagattgcggaatttaacccggctgttcattgtcaccacgtcgtgtggcatctcttctgggctacacatttgggcgcgatccaactctgcgtttaacgcgtcggcgattggcaaaccagcataggcgggttgctccagcagaatatcgatgcgttcggcatccaggtcgttaatgatgatagttggtctggacatttttactccatgtcgtcggtgctgcgagtgtcgcagataaacatacccaaaagaaaaccctcaccgtcaggcggcgagggtttaactcacatgatgatactgactgttgctcactctttgaagtgatttgcgtcacattcagggaattcctcaatgcagcgcattatgtataaatcttaatcgccttggtttatggaagacgaattagcgtgttttgtaaatcagatgattaataacccgctttatcaatcacaaaggttttgccacagttacctgggtgaggttgtggcaagaaactgtttgcagaaagcggagcgttgatggcgtcagctttgatgctgatctgaatttcagtcaaatacgcagggttaccctggcacgttagcttaactgctttcacgttctcttttccccagcttttggcaaaggcggcgtcaaagtcacggcggctcactgttttaccgtaattatccgcaaggaattttccggcttcgctctctttaatttcttgattcaggcgtaccatcgtaccgaagtatgcgtccggatcaaaaccaaagcaggcaccgtgtttggcatattcgtagcgttccaggcaggaacgtccgccagctcctggcatgacttcacttagtttagcggccgtttccagacttaatccggtttccgggctactacacattcggctggcgcgcgcttctggtagattcgggattgggcgagtagcgcaaccgaagcgcatccagcggcgttcatcaacaccacgggcagcaacgcttttaggcaatcctggccacagaccatgtacggtcagaaaatcagctttgttggtcgtttcggtttgcaggcgacattcatctcgttcgttacgatttcgatcgtgttgactctggcaaaatccggtttgccaggagagggccaggacatagcgatcaaaatcgccatactgttttgcctgcaacgctaaggcgttggcagaagagaagggaagcagagaaaccgcgagcaacgcggcgttacgccagaatgctttcataatgggtgtggaactcatacatacactgaatactatctattaaatcataaaaaagcccgccaggtgggcttacctggcgggcgtgatgatttattcagcgtttggcgaacgtattagttccacatggcgagaatcggccagccaaccaacagcaacatagagatgtaaatcaccccgaagattgcgccaagacgccagtaatctttacttttcacatagccacagccgtaaataatcaccccaggaccggttgcatacggcgtcagacagcccatgataccgatagacagcaccagcaggatacacagttgttccattggtacgcccggaatacctttaccgacggccagaataaccggcagcatggttgcggtgtgcgcagacaggctggcaaacaggtagtgtgcaaagtagaacaccagaaccagtacaatcaccgttgcgtttggactgaatccttccaggtgcgtactcatggtaccggcgaaccagtcaataaaaccagaacgagtcaggccgttagccatcacaaccagagttgccaggttgaccagtgtgttccatgcgctgttatagcgggtaatgtctttccaaggcacaacgtgcagggccagcattaggctaactgccagcagaccaaccgcagtagcattaatgacttcactgccaaatacccacaaacctaagctgagcaatacaaggccaatcagtgtccactctctgcgtgtcagcgcacccatggttttcagttcatcacccgcccaggttgccacttcttcactgtgtgtgatttccggtttgtacagcacgtaggaaagccacggcgcaatgataagcaagataaccccaaccggcaggaagcagaggaaccactgcaaccagctaatctggataccggcaattttgctgacgaactccagacccagcacgtttggtgccgcaccggtgacaaacatggagctactcagactggtactaatgaccatcatccacatcaaatagccgccaatacgacgcgcggacggatcgttcgggaaacttttaaacaacggcggcaggtttttaatgaccggaaaaaccgtacccccggtacgcgcggtgttggaaggtgtaaacggtgccagcagaatgtcgataatgacaatcgcataacccaacgtcagcgtgcgtttgcccatgaatttcaccaggaaaagggcaatgcgacgacctaacccggaaacttcataccctaatgcaaaaataaatgcgccaaataccagccataccgtggtgctggaaaaaccagccaggccccatttcagcgcctgtttttgcgcattaaacgctgggtcagctaattctttggcatcaaagagcaggtaattactgccaataacgcaaatagtaaccgcaataaaactgatcgctgttgccggaattggctcgaggatcatgccgacaatcattgccacaaacacagcgaagtaatgccatgcctgcggcggcataccgtcggggacagggataagaaacatgacacccatcaccaccagtggggccaatagtttccatatattatcttttgctaaagacatacgggttctccgaaaattaatatttccaaatttatcaagtgcttaaataattaaatctgtgctaaaaaccaggtaaggatcagtaggtcagcactgccgcctggactgagatttcgttcgatacactccctgtcgaactgccggagataatcgagatcggcgggggttcgaatgccccctttttgcaataatgtttgcgcctcgcgctgtagccagcgcaggcccccctcgccaccgcggcttgcaacgttggtatcgccgttgatcgccatcagtaggagcaaggtatcgagcaatgccagttcaggatctaacccctgatccagcagagtgaggtaatgcggcaaggcgtgattgatcaccagtggataacccgcttcggcttcaccgcgtgcgccggtaaggccaagctgttggtacaaccgttgacctgccgtcagttgactattattggtacgcagttcgcgatcggtcaggccacggcagaaacttgccgccgtagaacaaacggttgttggcgttaccggttggttgagttgaagcaaacggccaattgccgcacatagcagccctaaagaaaaaatgctgcctttatgcgtgtttacgcccgcagtggcgcggaacatatcaccttcgcaagccataccaattgggcgtaatccgtggagtaccgcttctggtgccatttccgcactacaggcaccaaattcaatgaaacggggtagccagccctgaatcgccagcgcgctgcggtggaaatcttccagcgccatatctttgtgcgcaccgcagttaatgcgatccacgaggcctggtttcggactcagattgacttcagtcagcatggcgcgccagcccagcagggcgtactcatcgattaaactcgtcgcaagctttgtggttttagtactcgttgcaggcatgctcatcgttcagcagtgcctccatgttatttagttgacgttgcaggcatcgacatcgttcagcagtgcctccatgcggttgagtaaatcggtcagttgatgggtttttccacgcgcgcagacggctgcgctttgttcgcacaacaggcagcggcgaggcggcagactatagtcgcggcgggagagaatttcgccttcgggcgtcaggacatcgatatcccataaccgcccgagaggatgactatgttcaagctcaatggtggcgagcttgaggtcgcgagccggggcggcaatgctcaacatgccctccggcccgctggcggaaaccagtgcagcctgctcctgaatttgccagccctgttttgcggctaaggcacgcaaggctgtcacgccatgattaaaaattcggcgtgtgacctcgctgtctttaatcggcccaggcgcaaccacggtaaaggagaccagtggaacaggatggcgcttgagccagacgtgttgccgtgcttgcctttcatcccggctgacgagcagctcgggaatacttaccgcatggtggctggcgagttcaggaagcaggtgcatggcttattccttcacctgatgcacaacatcgatcacgctgccatcgcggtaacgcacaacggcaacgacgcggtctgtgaattcaatcggctgtggttcaccggtcagcagacgcgcacgttcgcgcagccactcaatggaaaccactttaatgcccgcttcctgcagacgttctgccagttccggacgtgccgggttaactgcgataccgtggtctgtgaccagaatatcgacactggagcctggggtgatgcaggtcagtacgttatccaccagagtcggaatacgaccgcgtaccagcggcgcgacgatgatggaaagcgcagaggcaatcgcggtatcgcagtgaccaccggaagcaccacgcagtacgccgtcagagccggtcagcacgttaacgttgaactgggtgtcaatttccagcgcgctcagtaccaccacgtcgagacgatcaacgcttgcgcctttgctaccccagttagcgtactggttggcgctgatttcgatgtgattggggttacgggccaggctttgcgcagcatggctgtcaaagctctgcacatccagcagtttgcggatcagacctttttcgtgcaggtcaaccatcgtcgcggtaataccgccaagggcgaagtcggcgcgaatatcgcggctacgcattttgtcttccaggaaacgggttaccgccaggcttgcgccgccggtgccggtttgcatggagaaaccttctttgaagtagccagagttgacaatcacatccgcagcgctacgggcaataagcagttcgcgcgggttagtggtcatacgggtcgcgccagcgccgatttttgcagcatcgccaacgcggtcaactttgacgatcaaatcaacctgatcttgctcaatgcttgccggattatgcggataaggcagcagttcttcggtaagcatcacgacctgttttgcgttgtcggcatcaactattgcatagccgagggagccgcagcaggctttaccggtgtagccgttggcattaccgaattcatcacaggacgggacgccgaggaaagccacgtcgatattcagttcgccgctctgtaccagatgcacacgaccgccgtgagagtggatctgcaccggttctgccagcagaccacgggagatctcttccgccagtggaccacgcaggccggaggtataaatgcgggtaaccacgccctggcgaatgtgttctaccagcggcgcatggcaatcactcagggagctggacgccagggtcaggtttttaaagcccatcttcgcgatgacgtccatcaccatattgacggtcaggtcaccgccacggaaagcgtgatggaaggaaaccgtcatgccgtcctgtaaaccagagcgacgaatcgcttcttccaggttggcgcacagtttgcgatcgcgcgctttttcagcctggtaggtttgctttgggctgttctggaaagcggcaagatcgcattcagcgcgacgattccaggccgctacccgttcttgtcgttgagattgttcaattttctgcgtcattttgattgccttattcttcgcggatgccggaaagttctgcacgggagagcaccagacgggcgcgatcgataaccggaccgtccaccatcttgccgttcagggaaaccacgccgaggccttcgcgagcggcggcttcagcggcttctacgacgcggcgggcgtgatccacttctttctgggtcggtgcgtagaggttgtgcagcagatcaatctgacgcgggttgatcaggcttttgccgtcaaagcccagctgtttgatgtgggcggcttcttgcagaaatccggcttcgttgttagcgtcggaatagacggtatcgaacgcctgaatacccgcagagcgcgcggcctgcaaaatggaacagcgtgcgaacagcagttcagttccttccggggagcgttctgtacgcaggttgcgcacatagtcttctgcaccgagggcgataccgatcaaacgctcggaagcgtgagcgatttccactgcgcgggtaatccccagcggagattcaatcgccgccagcaggccggtgctgccgggttcacgaccacaggctttttcgatacgcaggatctctttttcaatatccagaacatcctgagcggtatcggttttcggcagacgcacaacgtccgcaccaccgcgaacgacggcttccaggtcgttaacaccccattcggaatccagcgcgttgacacgcacaatggtttcaatatcgcgatacagcggatgttgcagcgcgtggtaaaccatgcggcgggcggtgtctttttcacgcaatgctacggagtcttcgaggtcaaacatcagggcatcagccgggtagatgaaggagttgctgaccatcgcggcattggcaccaggcacaaacaacatgctgcggcgggtgcgagttttacgttgttgcaggctagcggaaatcattggcaatcctcccatggcagagccgggataccgctggcgcgtgccagcagggcttccagtcgtgcacgtaaaatgcagtacagtgcgcctttgtcatcgacattcagctgtacgccgcgcacgttgtagcgggcgagaacgtccagaatggtggtgcgaattgcatcgccaaactgtttctcaacgctgctattgatttgcaggtcgatatcctgcgtatcgagtggggcgatgcgtatcatcacatccccagactcaagggtgcctgcaacggcgggctggtttattttcatttttcacctgtttctcatgcgggggtcttttgacgagctgccgcgtcctggcgggagtgctcaagcaggttctgcaaataatgcagcgtgactgcagggaccagcggcgcgatagccgtgagatcgtttttcgccagcagttgacgtacccgggaagcggatatcggcatctcctggtaacgcagccgctcaatttcaaccagttcgatgggcggtgcggagatagtcggcgtttccagccagtagcgcatatcctggttgtactgggcggtaacgcgacaaaagggttcagtaccgacaaagcggtgagttacacccagcgcgggagcgaggtactgacggaaaatcttcagatcaatttcggtgtaacaatggttaatgacgctctgttctttaatgaagtagcaagggaacgtagcgcgggagatgatgtattcggagccacgatgcacagtcaggcgtggaatatcggcggtgccttttaacaccaaatccagccggtcttcataggggaagcgactagaatcttctttgactaaaaacagatgcaaccagtcgcactgtgccgcagcctgttgaatcagataacggtgaccattcgtaaagggattggcgttcatcacaatgcagccaatcttgttccctggatgacgaaattttttcaggctttcggcatagcgtttcagtcgcgtggcgctgttttccatcagcaccatcacgccgggtacgctggtcagcgtggaaaaaccgcactggcggaacagcgcctcgtattcggttttggtataaataaacagatgcgtgctgtgccgctcataggcgaggtttatcaattcagtggctaatgtcagcgccagtccttcaccgcggacggattcactgatagcaacgcatttaataatatttccggcaattccaccgcacgcgataagcttttcatcgcgggttacggtaataaatacttcgactgtggtgtcaacgctcaaatcattttcatgcaggaattgggcgatttccgccatttttttattttcactacgttttacgcgggtgaaaatatcattgccgaacataataaatagtatcctgaaggtgcatgttgttatcgatttgcaacgaatgttgttcaatgttgcaaactgataaccttttattttcacttgggagaaagggggtgatcgaggtatatctttttctcctttcgctatacatcctaaggagtatttcggcgtgaaattttgatttatttcacatagagttagtggttttttatttatttaatgattttaagttttttaattaatgtaattacgaaatgactcgcaggtttaagtgatttaattgatttaatgaataaaatttgccacgatcataattaatatctatgtattttgattcaacattttaattacatccgtcaaagaggctcgggacaacccgcaaggaaaacaatgttgcagcttaacgagaataaacagtttgcatttttccaaagactggcatttccgctgcgtatctttttgctgattctggtgttcagtatatttgtcattgcagccctggcgcaatattttacggccagttttgaggactatttaacgcttcatgtacgcgacatggcaatgaatcaggcgaaaattattgcctccaatgacagtgtcatctctgcggtgaaaacgcgtgactacaaacggctggcgaccatcgctaacaaattacaaagagataccgattttgattatgtggtgattggggaccggcacagcatccgcctttaccatcctaatccggagaaaattggttatcctatgcagttcaccaaacagggcgcgctggagaaaggggagagctacttcattaccgggaaagggagtatggggatggcgatgcgcgccaaaacgccaatctttgatgacgatggaaaagtcatcggcgtggtgagcattggctacctggtgagtaaaatcgatagctggcgggctgagtttttattaccgatggcaggtgtgtttgtcgtgctgttagggattctgatgttgctgagctggttcctggccgcgcatatccgtcggcagatgatgggcatggagccaaagcaaatcgcacgcgtggtccgtcagcaagaggcgctgtttagtagcgtttatgaagggctgattgcggtggatccgcatggttacattaccgccatcaatcgtaacgcaagaaagatgctggggctgagttcccccggacggcaatggttgggtaaacccattgttgaagtggtcaggcccgccgatttctttaccgaacagattgatgaaaaacgtcaggatgtggtggcgaactttaacggtctgagcgttattgccaaccgggaagctattcgtagtggtgatgatttgctgggggccattatcagctttcgtagtaaagacgaaatttccaccctcaatgcgcaactgacgcaaataaaacaatacgttgagagccttcgtacattgcgacacgagcatctcaattggatgagcacgctcaatggtctgttgcagatgaaagagtatgatcgcgtgctggcgatggtgcagggggagtctcaggcccagcaacagcttattgacagcctgcgcgaggcgtttgccgatcgccaggtggcggggctgctttttggtaaagtgcagcgcgcccgggaactggggctaaaaatgatcattgtccccggtagccagcttagccaactgccgccaggactggatagcaccgagtttgcagccattgtgggcaatttacttgataacgccttcgaagccagcctgcgtagcgatgaaggaaacaagatcgttgaattattcctcagcgatgaaggcgatgatgtggtgattgaagtcgccgatcagggctgcggcgttccagagtctctacgagacaaaatatttgagcagggggtcagtacgcgtgctgacgagcccggtgaacatggcattgggttgtacttgattgccagctacgtaacgcgctgcggtggtgttatcactctcgaagataatgatccctgcggtaccttatttagtatctatattccgaaagtgaaacctaatgacagctccattaaccctattgatcgttgaggacgaaacgccgctggcagagatgcatgcggaatatattcgtcacattcccggattcagtcagatattactggcgggaaatctggcgcaggcccgaatgatgatcgagcgttttaagccggggctaatcttgctcgataactatcttcctgacggtagagggattaatttactgcatgaactggtgcaggcgcattatcccggcgacgtggtgtttaccactgcagccagcgatatggaaacggtgtctgaagccgtacgttgtggtgtatttgattatctcattaagcccattgcctatgaacggctggggcaaacgctaacccgtttccgccagcgtaaacatatgctggaaagtattgatagcgccagccagaagcaaattgatgagatgtttaatgcttatgctcgcggtgaacctaaggacgagctaccgaccggcattgaccccttgacgctaaacgcggtgcgaaaactgtttaaagagcctggtgtgcaacatacggcagaaacggtggcgcaggcactgaccatcagccgcaccactgccaggcgttatcttgaatattgcgccagccgccatctgattattgctgaaattgttcacggcaaagttggcagaccacaacgcatataccacagtgggtgacatgataaagccggaggaaacttgcctccggcattactatttacttgcctgtgaccgctgctgccgttcctggcaccatcagctctgtagcaacgataacaatcaccaaaccaacaagcaccggtacgctggtgcgttttacgacttcaaacgggctgatcttcgccatcccggcaaccgcaacgactacgccagaaacggggctaagggtacggccaaggttactcgcctgcagcatcgggatagtcaaatacgccgggttaatgccggaagagtgcgccagtttcgggatcatctcaacaaacgcataaaacggcgcattgccactaccggtcgtgactgccgccagcattgtcagaatcaccaataccagcatcaggatgatactcgcgctaccaaagctggtagcgatagaaatcagactttgaataaagccgatggtgctaagcccctgagcgaataccccagcggcaaccagcagcatcaccacgttagcaaacgcatctgccatcccgcgataagccacttccagaccagagaaaactttctgggtattaaagctgcggaggaactccagaatggaggcaatcagcatacaaatcaccagaatagtgatgatgtgtaattgcggaccccatttaccgtcaaaaatcagtacaccgatgatcggcgtgaacggcaaaatggcataaaacgcaggagcagtggtggtgatttcactgacatctaacatttcatgagagatgtgctcttttttatccagataacgttgccagaagaagtgggcgatcgccatgccgataattgcagcaatactgataggcagcgtcgttttgaaggcgaagtcaatcaggctcatttcggaagcttgcgccgccagcaccacatccccactagtcggtgcgagaataatcgccgccggggaggcacaaatggcagcagctgcgccacgactgataccaacgtttaccatcaccggaaatagggttgccatcagcaaaacacccagaccggttgcggaagagacggccagagacatcagacaggcgacaaaataggcggcaatcatcagcaggtaaggggagttaatatactgcaatggtttactcgccagcttgaccaccatatcattcgcgccgatatgggtcatgtaagcggcaaatccacacagcatcataatcatcatgccgaggtcgccgccgcggctcattagtaatattttaacgtattcaacgatatccgtggcgctgtagcctgtactagcctggctggacggtaacactttgtgccccataatggcactgataatcagcaataacaggccaccgacaaataacacaccagtggcggaataccctttaatgatgtagcgagctacacccacaataaccacaaccccaataaggagctcaatgaatgtcagcataatttttcctgtctccaggccccaaagtaaataataaaaaattcctaaagcttaaggaaaaaatatgcccaataaattggcgatgaatgctgattaaaatcaagaaaaactgccattaagacattgaagttgctgtttttatacatagataacaaaacgcatatttagcggttggcaattatcacataataatgtgtgcaaattgatggtggattgatgcaaatttgttaattgcaatggtgttagctgcggctgtgcgctcaaaaaataatctaatatgagcataggttgacgatatatattatatacttcgttaagatgattgttgtatctcgttaaaaaataaaataatttttccttgattgcattttgtcatcaaaaaagacttggtttttcttttttgactattcccatcgcagaaaacgacgcatcatctttaatcgatgcgcggaaatatttaacttgaacaagcggaaataaatagagcagctattcagattattctttatgttgggtctattaaggttatgttaattgtagctttgctatgctagtagtagatttttgataaatgttttatggtcacaaatgaacgtgagtaaatatgtcgctatcttttcctttgtttttattcagttaatcagcgttggtaaagtttttgctaacgcagatgagtggatgacaacgtttagagaaaatattgcacaaacctggcaacagcctgaacattatgatttatatattcctgccatcacctggcatgcacgtttcgcttacgacaaagaaaaaaccgatcgctataacgagcgaccgtggggtggcggttttggcctgagccgttgggatgaaaaaggaaactggcatggcctgtatgccatggcatttaaggacagctggaacaaatgggaaccgattgccggatacggatgggaaagtacctggcgaccgctggcggatgaaaattttcatttaggtctgggattcaccgctggcgtaacggcacgcgataactggaattacatccctctcccggttctactgccattggcctccgtgggttatggcccagtgacttttcagatgacctacattccgggtacctacaacaatggcaatgtgtactttgcctggatgcgctttcagttttgagacaaatgaagttttagtaacttctttaaaatcaatagctaaaataagtaacatcaaaaataacgcgacttttatcactttttagtaaagttacactggacaaagcgtaccacaattggtgtactggtaaccgacacagcatttgtgtctatttttcatgtaaaggtaattttgatgtctaagattaaaggtaacgttaagtggtttaatgagtccaaaggattcggtttcattactccggaagacggcagcaaagacgtgttcgtacacttctctgcaatccagactaatggttttaaaactcttgctgaaggtcagcgcgtagagttcgaaatcactaacggtgccaaaggcccttctgctgcaaacgtaatcgctctgtaagatacgtcagcaagaattcaaaacccgcttaatcagcgggttttttttggtctttagtgtgcggtactggcgctaaacagccagaatgccagtgcggtcatggcaaaagaccccagaaggttgacgaaaacgttcagtaatgcccagccaaagcggccctcttgtaacaaaaacaccacttctgcgctaaatgtactgaaggttgttagaccgccacaaaatccggtggtgattaatactttccacactggatcaatgttcgtcatcctgctgaaccatgcgaatcctattcctatgatgaatgccccaatcaggtttgctgtcagcgtccccaacggaatcgcctgatgcagtgggttaaatcgcatacttaacagccatctcgccacgcttcccgtaccaccgccaataaaaactgctaaaagaagttgtaacactgcaaaatcctgctatttgatttgtatgagtgataagtgtaacgccgaataatcgtcgttggcgaattttacgactctgacaggaggtggcaatgctggttgccgcaggacagtttgctgttacatctgtgtgggaaaagaacgctgagatttgtgccagcttgatggcgcaggcggcggaaaacgacgcaagcctgtttgccctgccggaagcattgctggcgcgcgatgatcatgatgcagatctaagcgttaaaagtgcacagctgctggaaggcgaattcctcggactttacggcgagaaagtaaacgtaacatgatgacgacaattctgacgattcatgttcctagtacgccggggcgcgcatggaatatgctggtggcacttcaggcaggaaacatcgtcgcccgttatgccaaactgcatctctatgatgcatttgccattcaggaaagtcgccgtgttgatgctggtaatgaaatcgctccgttactggaggtggaagggatgaaggtcggtctgatgacctgttatgacttacgctttccagagctggcgctggcacaggcattacagggagctgaaatcctggtacttcctgccgcctgggttcgcgggccgctcaaagagcatcactggagtacgttgcttgccgctcgtgcgctggataccacctgttatatggtggcggcgggggagtgcgggaacaaaaatatcggtcaaagccggattatagatccctttggcgtcaccattgcggcagcgagtgaaatgcctgcactcattatggcggaagtgacgcccgaacgtgtgcgtcaggtgcgcgcgcaactgcccgtcttaaacaaccgtcgctttgcgccgccgcaattattatgatgtttttttactcggcgcttgattcaccttgttacagattgctattgtgtgcgcgcgtcgaatgaccgttaatattctctggtttttaaggcgcgttctgttgccggttatatgtcaagaaggtatctatgggtgagattagtattaccaaactgctggtagttgcggcgctggtcgttctgctgtttgggactaagaagttacgtacgctgggcggagaccttggagcggccattaaagggttcaagaaggcgatgaatgatgacgatgctgcggcgaaaaaaggcgcagacgttgatcttcaggctgaaaagctctctcataaagagtgacgtggcgagcaggacgctccctcaatatcttgttcgatacaaaaaacccgcttcaaaaagcgggttttttatcagacagatgtaagtaattattacaggattacttaacttccatccctttcgcctgcaaatcggcgtggtaagaagagcggacaaacggaccgcatgcagcatgggtaaagcccatcgccagcgcttcggctttcatttcgtcgaactcatccgggctaacgtaacgttgaaccggcaggtgatggcggcttggctgcaaatattgccccagcgttaacatcgtcacaccatgacggcgcaggtcgcgcattacctcaataatttcttcattggtttcacccagtcccaccatcagaccagacttggtcgggatttccggatgcgcttctttaaagcgttccagcagcttcaggctccagttgtaatctgcaccaggccgtacctgacggtaaatacgcggtacgttttccaggttatggttgaacacatctggtggcgttgcagtcagaatatccagagcacgatccatacgaccgcggaaatccggcaccagagtttcaattttgatttgcgggcttttttcccgaatggcagtaatgcaatccgcaaagtgctgggcaccgccatcgcgcaggtcatcacggtcaacggaggtgataaccacataacgcagcgccatatcggcaatggtctgcgccagtttcactggttcattggcatcaggagctaccgggcgaccgtgggcaacatcacagaacggacaacggcgggtacaaatagcgccgaggatcataaacgttgctgtgccgtggttgaagcattccgccaggttagggcaggaggcttcctcgcagacagaatgcaggccatttttgcgcattgcggctttgatgccctggatacgtgtagagtccgctggaagcttgattttcatccattccggcttgcgcagcagggcttcgcgctctgttgccacgtttttaaccgggataagggccatcttatcggcatcgcggtatttaacaccgcgttccatcacaatgggtttactcatagcgtgcgtgttccagttgcgaattacgaaggaaagcgtttcaattcaatagattgttgtaattatcaactatttttgaattaacgactggcagtatatcattgaaacggacctgaaagcagccaaagcggtcgcgaaaatgtaaaattgttgttggattgtgccattttatcgttctgcgctgtgatctggctgtaacaatactttttcaaaatgcattacggataacatctattactccgtgcaggatgggatcacgcaggctgaatttgttgtagtggatagagaaatctatttgctcctcatttaaggacggaaaaggcagtttttccagcggccagcagcggctaaacaggttataaaaacggctgggaataatcgctaacatgtcactgttggcaaccagtgcagcgattgtcaaaatgttgtagctggtgaaattgatttgccggtccggaaacatttcttgaactctctgccgcagaccgctgaaattttgctcttccggtaacagaagtacatgcgcagcgttgtcgatagtctctctgtcatcttctaaagagagtagtggatttccctcgcggcaaattaacaccatattgtcggtgaacagaacatgatgttgcaccgtacgattggtgcaaaacatgttatcgatgatgagatcggtttgaaactgactgagttggttttccgcgtcgctgatgggcgggttgcgcagtaaaagctgcggatagtgagttttaatcgcccgatagatgacaggaaggaccagtgctccgacgctgggagtggtcgcaatagttatcgttcgttgcttatcatagcttccttcgatatccagcgcgccaagaatggactcaaggccctgactgatatactcatgtagatgcatcgcaaatgcggtaggagtgacaccctggcctttgcgaataaacaatgggtcagggaatataacgcgcagtttctgaatagactgactgattgcgctgggggtcagattaagcactttcgctgcattaacgatccctttatgtacatatacagcttcaaaaatagtcagaaggttaagatcaatatttcgtaaggttgtaaatatttgtggtttaccttcactgctctttctgcttaaacagggttcaatttgattattactatccacgcacttactccaattttattcatggaaaaataatatttaaaaaattacaataatcttatgtctaattggaacggaacgcttttgctcaccataatcaactatttcaataggttaatcaatggggtgagttacggagcaaggcgtggcaccgcatttctgcaagtgataaagaaaatatacaaacgcgaaggagatgtaaagcattagcagatattatgagtaatgacccagtgtaaattgggccattgatgtatggaattaagcggtaatatattcgaagtccggattgtttagtagcgctaaaatattttccagtaaacgtggagcaatattattagtcgtcgcttcgggtttccattgacttattttagccatttccattccggcatacccacaaggattaatacgtaaaaatggactaagatccatattgacgtttaatgccagaccgtggaaactacaaccgcgtcgaatacgtaaacccagactgcaaattttcttttccccaacatagacacctggcgcgtcagcccgaggatgcgcttctatacccagttcagccagggtattcaccactgtttgctcaagcaaggtcaccagttcacgcacaccgagtttacggcgtttcaggttaagcaacacatacatcacctgttgccccggcccgtgataagtcacctgcccaccgcgatcgctctggatcaccggaatatcacccggcattaaaatgtgctccgcttttcctgcctgaccttgggtgaataccggatagtgctcgaccagccagatttcatcaagggtactatcatcgcgggtatcggtgaattcatgcatagcctgggagattggctcgtaaggctgaagaccgagctggcggacaagaattttatcctgatacaaaacggcatctccgtggagaatgagtaaaagtgggggaaaagtatatcacagcgaggagaggggagttacccgaccaggagccgggtaacggagaagcgagttacagaaccatgcggacaatatcgattttgcccagttcttcatacagtgtttcaacctgctcgatatgagtggcgttgatagtgatagatacgctgtggtagttgcctttgctgcttggttttaccgttggggtgtagtcacctggcgcatggcgctgtaccacttcaaccacctgatcaaccagctcaggtaacgcctgccccataactttgtaagtaaaaggagtagggaattcaagcagttcgttaagtttggttttcatgtcagctccggcgtaacgtaattaaatagcaactcccgccagaaggcgggagttttttactgatgcttagtatatggggacggaaattacactttcaagtgtttaatttttaaccaaaccagtgatggaacattaatttaatgtaatcaatgattttgccgaagaagttaccttccgggatttcttgcaacacaaccagcgggcgttgctcgatcgttttgccatcaagctggaagttgatagttccgacgacctgattcttttgcagcggcgcatgcaattcactgctgttcagcacatagctggctttcagatctttcatgcgaccacgcggaatggtcaggtacacgtctttatcaacccctaagctagcgcgatcagaatcaccaaaccaaaccggttcagaggcgaactctttacctactttcagtgggttaacggtttcaaagaaacggaagccccaggttagcagttttttactttcggcttcacggcctttaaaagtacgtccgcccattaccgcagaaatcaagcgcatctggccttcagtcgcagaagcaacaaggttgtaacctgctttgtcagtgtgtccggttttgatgccgtcgacattcaggctgttatcccataacaggccgttacggttcagctggcgaataccgttaaacgtaaattctttttctttatagatgctgtattcattcggtacgtcacggatcaatgcctggccgatcagcgccatatctcgcgcggagctgtactgaccatcagcatccagaccatgtaccgtctggaagtgggtatttttcaggcccagtgcgttaacgtagctgttcatcaagccaacaaaagcgtcctggctaccagcggcaaaatcggccatggcgacacaagcatcgttaccgctttgcaggttaataccgcggatcagctgagaaaccggaacctgcatgcccggtttgaggaacatcaggctagaacctttaaacaccgggttaccggtggcccatgcgtcgttgccgatagtgactaaatcagtttctttaaatttaccggctttcattgcctggccgataacgtaactggtcatcattttggtcaggctggcaggatcgcggcggacatctgcgttctgttcggcgagcactttgccggagttatagtcaatcaggatgtaggactccgcatcgatctgcggtacacccgggatcatagttttgatattcaggtcatcggcatgtgcagcagagataaaggctgtgcaaagagccgtggtgagcgccaggcgcttcatgatacgagcggaaaaaatggtattcatggtctgaactacgacatccgtgatggaattaaaaaagtgccctactatagcaaatgcactaccggcaggcatctgactttccgcgtgactttgttaacgtcatttacagaaattgacacatcagatgcctgctttacgttactgcgcggtagtaataaaactctgtaattgggcttcggtttgcaaacgttgctgcaaggtactggcttcggctttgctggcgaatgggccaagctggatccgccagaccgcgccattttgagttacgcgaccggggacgccgaacttctgtcccagttgctgttggtactgttgcgcacgagcctgatcgcttacggccccgacttgcaccataaagttgccgctggcgctttggctgacggcttgcggtgtcaccattgcagggctggttgcaggcgttgtgctcggagctgtaacaacgggctgtggcgcaggcgtcggttcgctgccttccagtacaccaggcgctaaggtcgttggtgcgccgaggaaaccgctactggttaccggcgcgccggtcggatcttcgctttttagcgtgctattactgaccggaagaatgtcaccctgcgggccagacacactacttgttcccgcgccaccgcttaaatcgggaggtgcaggcagggcgtaagtctgtttggcgactgtggtacaagccataccaggaccagaaaggctaccatcctgggcaacaataatcggatcgatacgaactttggtgttgttactcgtgttaagacggtcagctgccgcgcgagaaagactaataacgcggtcgttgccgtaagggccgcgatcattaatgcgcaccacgatcattcgcccgttagccaggttagtgattctggcgtagctggggatcggaagcgttggatgggctgccgtcagctgtgtcggatcgaatgcttcgccagaggccgtcaggttactgccgggttcggcatcatagattgccgccagtcccgcctggctaaatcgagacggatcctgcacgattttgtagcttttaccgtcgcgctggtaatcctgatttgccgtcgcgttcagtggttcgaaacgcgggtccgccccgctaatttcaactatagggccgttacataccgcaggctgcggtacacttaccgtctgttgctgaccatcatcgcttgtacatgccgcgagcattcctgccgcgatgcagatcccgagccactgcttacgcattgcgcacctcttacacgcttttgctcaacattttcctgtgggtgtggatactcattacaatcccgaacccagccatcagcacaattagcgcgcttcctccataactgaccagtgggagcggaacccctacaaccggcagaataccgcttaccataccaatatttacgaagacataaacgaataatatcagcattaagccgccagccatgacgcgaccaaaggtggtttgcgctctggcggctatccacagcccgcgcatgatcagcagaatgtagagagcgagcagaatcagaatgcccactaatcccagctcttccgccagtaccgcgaagataaagtcagtatggcgttcggggagaaattcaagctgactctgagtgccgtgcagccagcctttgccgcgtaatccgccggagccaatagcaattttagactgaataatgtgatagcccgcgccgagtgggtcactttccgggtccaggagcatcattacgcgctggcgctggtaatcatgcatcaggaagaaccacagaatcggaatgaacgccgctaccagcactactgcgacgccaatcagacgccagctaaggccagagaggaacagtacaaacagaccggaaagcgcaacgaggatacttgttcccaggtcaggctgtgcagccaccagcagcgtgggcataaatatcagcaccagcgcgatgccagtgttcttcaagcttggcgggcaaacgtcgcggttgataaagcgcgcaaccatcagtggtacggctattttggcaatttcgctcggctgaaaacgaacaataccgaggtccagccagcgttgagcacctttagagatggcaccgaaagcatctaccgccaccagcaaaataatacagatgatatagagatagggggcccagccttcataaacgcgtggaggaatttgcgccatcaccaccatgatgaccagacccatcgcgatttggccgattttacgctccatcatgccaatatcctgaccgctggcgctccagataaccagggcgctgtaaaccagcaatgccagtaagatcagcagcattgtgggatcgagatggactttatcccagaatgtttttttattcggattatccgtcatgattaatggtcctccgctgcggcaaccgctggattttccgcaggcagatcggtgttgttatcacccagcataatgtggtcgaggatctggcgcatcagtgtaccaaccgccggacccgcaccaccgttctccagaatcatggcgacagccacttgcggattgttgtatggcgcaaaggcggtcatcagtttgtggtcacgtaaacgctcggcaattttgtgcgcattataggtttcgttcgctttcagaccgaagacctgagcggtaccggatttcgccgcaattttgtacggtgcgctagcaaagtatttatgcgccgtaccgttagggcggttagcaacaccgtacataccgtctttcgccagctcccagtaaccggaatgaatatcgccgacgggcggttcatgcggctgtacccatggcacctgtttgccgtcttcggcggtgctcatcagcaaatgaggaaccttcacgataccgtcattaatcaggatcatcagtgccttactcatctggattggggtcgctgtccagtaaccctgaccgataccaaccggaatggtgtcaccctgataccacggttttttaaagcgtttctgtttccattcgcgggtaggcatgttgccggaacgttcttccgccaggtcgataccggtgtaatgaccataaccgaatttacccatccattcggagaggcgatcgatccccatatcgtaggccacctgatagaagaaggtatccgcagattcttccaggcttcttgtgacattcagacgcccgtggccccattttttccagtcacgataacgtttttcgctacctggcagttgccaccagcctgggtcaaacagcgtcgtattgcgcgtgatcaccccggcgctcaatgcgctaaccgccacatagggtttaactgtagacgcgggaggataaaccccctgtgtggcgcggttcaccagcggtgtattcggatcgttcaacaaggcggaataatctttgctggagataccgtcaacaaacaagtttgggtcataactaggcgtggaaaccagcgccagcaccccacctgtacgcggatcggtgactaccacagctgcgcggctacccgccagcagcgtttcaatatattgctggagtttgagatccagcgtcaggtaaatatcgtgtccggcttgcggtggtacttcttttaactggcgaataacacgcccacggttgttaacttcaacctcttcataaccggtctgaccgtgcagcacatcttcatagtaacgctcaatgcccagcttaccgatatcatgcgttgccgcatagttggccagtttgccgtcattattcaggcgttcgacgtctttatcgttgattttgctcacatagccgatgacgtgggtcaacgcgctaccgtaaggatagtaacgacgtttatagcctttaacttcgacacccggaaaacggtactgattgacggcaaagcgagctacttgtacttcggtcaggttagttttcaccggaatagaggtgaaacggtgactacgtgcgcgctcttttcggaatgcagcaatatcgtcatcggtcagatctaccacgctgcgcaaagcgtccagcgtttgctgcacgttatcgactttctccggcatcatttctatctggtagatagtgcggttgagggccagagggataccgttacgatcgtagataatgccgcggctgggcgcgataggcaccagcttaatgcggttttcattagagcgggtctggtagtcggtaaagcgaacaatttgcagattatacaggttggcgataagcacgccggtcagcagcaaaatccccaaaaaggcgaccagcgcccggcgcacaaacagcgcggactctgccgtatagtcgcgaaaagagttctgtagtttcatccgctgcgttttctactcaaagctcccttatcactcacggtgataaggatggttggtggtgatgctccacgcccggtacagactctctgcgaccagcacgcgaaccagcggatgggggagggtaagcgcgctcaggctccagctctgctcagccgccgctttacaggcagggctcaacccttcaggcccgccaatcagtagactgacgtcgcgaccatccagcttccagcgttccagctcagcggctaactgcggcgtatcccagggcttgcctggaatatcgagggtgacaatgcggtttttgcctgcggccgccaacatctgctcaccctctttgtcgagtatgcgcttgatgtccgcattcttgccgcgttttccggccggaatttcaatcagctcgaagggcatatctttcggaaaacgacgcaggtactcggtaaaaccggtttgtacccagtccggcattttcgttcccacggcgacaagttgcagcttcacgcattaactccagagtttttccagttcatacaggcgacggctctcttcctgcatgacatggacaatcacatcgcccaaatccacgacaatccagtcggcgctgttttcaccttctacgccgagcggtaacaggcccgctgcgcgagactcctgcacaacgtggtcagcaatggacataacatgacggctggacgtacccgtacagatgatcatgcagtcggtgatgctggatttgccctgaacgtctaaggcgatgatgtcctgacctttgaggtcatcaattttgtcgataacaaaatcctggagtgctttaccctgcaagttttccccctgggtgaatcaaatagataaaaatggtctgtcagtatacctgaaccagaggcgatttcgggacaattgtcgccgaatcggctttcgaaagtgggctatcatcccaccccgcgccgcagattgcatcgccatttttgtaaaacaatttctacaaagtcgtgtctggcggaaaaagtctggctgcggagaatatcagcctgcccgggtctgtcaatggtcgttgcggcttacccgtaaaaaaacagaaaagtcatgcattctcgaccccgatggcacggctattgaggacgcgtagcgtcgcgaatttttggttgatatcaatggcgctccaacacccctggtcaacgcgaaaatgccacatagcttcggcaggcatgccaattaaacgggcgattaacagactcagtacaccctgatggctgacgactaaaatattctgatagtgctgaaattcactaagccttgcgataaagcgttccacacgttggctaaatgcctgaaatccttcaccgttcgtggggattgcatgctgccagtcattgcaccacgcgctatagttttcggcatcttcttgcatgaggtcgcgatgatgtcgcatctcccagtcgccaaaaaacatttcgttgagttcaggtatgatttgcacggggagctggcggtcactgagaaccagtcgcgcggtatgctgtgcccgttccagttcactgcataaaaccagatcaaaggaaacaccatgtagcagcgtatgcagattttgcgcttgctcaataccgcgcgcggtcaggggggtgggcgcatgaccgctgtaaagaccatcgatattcgcttgcgtttcaccatgacgaattaaccacagtcgcatcatgccctccgtaacgacaggtatcagcgatacaagccttgttggttaatgtaagtcagtaccggttccggcaataaatcctcacaactttcaccgttttgcaaacgttcgcggatgatggtcgcgctgatgttaaaccacggcgtttcagccagataaattttaccggcaggctgaaggtgaagatcttccgggttatgtgtcaaatgatcttccagccattgctggtattgcggttgcgccatttcaagtgggtaacctggacgccgacagacgatcaaatgtgcattgtcgagtatcgtttcgtattcgtaccaggtcggaaaggtcagcagactatcctgaccaataataaacgccagcggcacgtccggtccttgttcctgccgccactctttcagtgtttgcgcagtgtaagagggggcattgcgctttagctcgcgttcatcaagagtaaataatggcttgtcggcaatcgccagttcaagcatgtgtttacgctgcacgctgttcgcttccggctggggacgatgcggaggaacattattagggatgattgtgacccgcgtcagaccaatcaaattcgccagcgtttccacgggttttagatgaccatagtgcaccggatcaaaggtgccgccaaacagagcctgtaaagatttcatatcaaccgtcgataaatacgtccgccaggggtttatggcacaacagaagagataacccttccagctctgcccacacactctgaccgtaatcttgtttgagggtgagttccgttcgtgtcaggagttgcacggcctgacgtaactgcgtctgacttaagcgatttaacgcctcgcccatcatgccccggcggttctgccatacccgatgcttatcaaacaacgcacgcagtggcgtatgggcagactggcgtttcaggttaaccagtaacaacagttcacgttgtaatgtgcgcaacaaaataaccggttcgctgccttccagacgcagttgctgaagaatatgcaatgcgcgcttactttttcccatcaacaaagcatcaacccaatgaaaaggggtgaaatgcgcggcatcattcaccgcctgttcaacgcgcggtaatgtcaatttgccgtctggccagagcaggcttaaacgctccagtgcctgagccagcgccagcaggttaccttcataacagtagcagagcacctgatttgccgcgtcatccagttctaagttgagctgttttgcgcgcgcagcaacccagcggggaagctgagcctgctccggtgtctgacaggtcacctgcacgctgcgattcgcaagcgcagtaaaccaggcggcattttcttgcgctttgcttaatttattaccgcggacgatcaacagcaggtcgtcatgcagaagtccggtgagtgtgagaagttgctcattgatcgccgcattcggtccgttttctggtaacaacagcaatagcgtttgtcgactggcaaacagactcatagcctggcataagctaaagatcgcattccagtcagtgttgggatcaatggaaaaagtgtggtgttcttcgaatccttgtgccgcagctacctgacgaacagcgtcctggctttcctgcaataacagaggatcgttaccaagtaaaagatacgccgcgcgcagcccttcattgagctgcgcgcggagttgttccgggtacaaccgaatcatcagttacccagcgtggtggagacgcgtgcaggcgttgccggagtatccgttgtggtgctcgtctgttcttcgtcggaacgaatatccgcagcacggatgcttggcagcttacgaatcagctgttcggcagcacggtcgtacatctcttttacgatcatgtcttgttcgttatctttcgctaacgccatttgcgggttatcgaagaagctacggaagactttggcgctaatcgggtagatatcacggccggggatcaacacggtcgcattaaccgtcatgatcatctgatactctgctgtttgaccgttacggaatacgcttgcggtatctttcgcgatgctcactttacccaaacgcaaggatggaacgtccttacgcgtggtttctttatcaagcaactcgacaccattcagacgtaactggttacgcaccgcacggcttaatggcccgttcggatcgccactgtccaggatcatgaccttcatagtggaaggaacctgcgtggtatcacgcagatgccagccacacccggcggtgattaacaccgccagagataacaacaatgttgccagatatcgcacgcttcctcccgcgcttagccaacgaccagattgaggagtttacctggtacgtaaatcactttacgtacagtaacgccatcaagatattttgctaccagatgttcctggccagcacgttcgcgaacctgttcttccgttgcgtccaccggaacggtgattttggcacggactttaccgttaacctgcaccacgaccagcgtggagtcttccaccatcgctttttcgtcagcaaccggccacggcgcgttgtcgatatcgccttcgcctttcagttcctgccacagcgtgaagcagatgtgcggggtgaacgggttaagcatacggacaacggccagcagtgcttcctgcatcagagcgcgatcctgctcgccatcggttggtgctttcgccagtttgttcatcagctccataatcgccgcaattgcggtgttgaaggtctgacgacggccgatatcatcggtcactttagcgatcgttttatgcacatcgcgacgcagcgctttctgattttcagtcagcgcatcaacgttcagtgccgcaacatcaccttttgctgtgtgctcgtaaaccagtttccagacacgtttcaggaagcggttagccccttccacaccggattcctgccattcgagagtcatatcagccggagaagcaaacatcataaacagacgaacggtgtccgcgccgtaacgttcaaccatcacctgcgggtcgataccgttgttcttgctcttggacattttgctcatgccggtataaaccagttcatggcctgccgcatctttcgctttcacgatacggcctttctcgtcacgttcaacgatagcatcaaccggggaaacccagttacgttcgccgttttcgccaacatagtagaaggcatctgccagcaccataccctgacacagcaactgtttcgctggttcgtcagagttcaccatgcctgcatcacgcatcagtttgtggaagaagcggaagtagagcaggtgcataatggcgtgttcaataccaccaatgtagatatccaccggcagccagtagttagccgcttcggaatccagcataccttctttgtactgcgggcaagtgtagcgcgcatagtaccaggaggactccataaaggtgtcgaaagtgtcggtttcacgcagtgctggcataccgttaacggtagttttcgcccactccggatctgctttaatcgggctggtaatgccgtccattaccacatcttccggcaggatcaccggcagctggtcgtccggggtcggcattacggtaccgtcttccagcgtcaccatcggaatcggcgcgccccagtaacgctgacgggaaacaccccagtcgcgcaggcggtagttcactttacgctcgccaacgcccatcgcagtcagtttatcggcgatggcgttgaaggccgcttcatggtcaagaccgttgaactcgccagagttgaacagcacgcctttttcagtcagggcttgctgagaaagatctggctcagagccgtcagctgccaggataaccggtttgatgttcaggccgtatttagaggcaaactcgtagtcgcgctggtcgtgccccggtaccgccataactgcgcccgtgccgtactccatcaatacgaagtttgctgcccaaacgggaatttcttcgcccgttaatgggtgaaccgctttaaagccagtatcgacgccttttttctccatcgtcgccatttcagcttcggcaactttggtgttacggcattcgtcaataaaggccgccagttcaggattattttccgccgctttctgcgccagcggatgacccgcagctaccgccaggtaggtacaacccataaaggtgtccgggcgggtagtgtaaacggtcagcgtgttgtcatagtcgttaacgttgaaggtgatctccacgccttcggaacgaccgatccagttacgctgcatggttttaacggtgtctggccagtgatccagtttatccagatcgttgagcagctcgtcagcgtaagcagtgattttgataaaccactgcgggatctctttacgttcaactttggtatcgcagcgccagcagcagccgtcgataacttgttcgttcgccagtacggtctggtcgttcgggcaccagttgaccgcagaagtcttcttatataccaggccttttttatacagctcggtgaagaatttctgttcccaacggtagtattccggcgtacaggttgccagctcgcggctccagtcataaccaaagcccagcattttgagctggtttttcatatacgcgatgttgtcgtacgtccacggtgccggagcggtgttgtttttcaccgccgcgccttccgcaggcagaccaaacgcgtcccagccgatcggctgcaggacgtttttgcccagcatacgctggtagcgggcgatcacgtcaccgatggtgtagttacgtacgtggcccatgtgtagtcgaccagaaggatagggaagcatagacaggcagtaatacttctctttgctctcgtcttcggttacttcaaatgtgcgcttctcatcccaatgaagctgtactttggattctatctcttccgggcggtattgctcttgcatggcagccagtggtcctgttttcaatacggctacaaatgtagcgttgaggtggtttttcagatccgcatagcatagcccaaacgtccgcgtcaaaacagcctttcgcgcactcgacgttgaaatgatgcccggattattcatacattaatttacagagtttgtgggcgtattagcaaagcaaggaacaaagaacgtctattattatagtcagttaacgacccgggagatgaaacgatgaacaaggttgctcaatattaccgtgaactggttgcgagtctgagcgaacgcctgcgcaatggcgaacgtgatatcgacgcactggtggaacaggcgcgcgagcgcgtaataaaaacaggggagttaacgcgaaccgaggtcgatgagctgacgcgagctgtcagacgtgacctggaagagttcgccatgagctatgaagagagcctgaaagaagaatctgacagcgtctttatgcgggtgattaaagaaagcttgtggcaggagctggcagacatcaccgataaaacgcagcttgaatggcgcgaagttttccaggacctcaatcatcatggggtttatcacagcggagaagtggtcgggctgggaaatctggtctgcgagaaatgtcacttccatctcccgatctacacaccggaagtgctgacgctatgcccgaaatgtggtcatgaccagttccagagacgcccgtttgagccgtaatagtctgatttcgcacagcaataaagagaatatgggccgaatgaaattccccggcccttgtttttatctttacagtaaatcttcagtctcacgaatttcctgactgacatctctggttccggaactctgaactttacgatacaggtcgagagcctgtcggagatcgacaggtcttccttctccgtagtgatacataatggccaggttataccaggcagtggcgtcattgcattcagcggctttcgtaaaccattcaaaggcagcctgataatctttctcaacgccttgtccgtgtttatacatataaccgatgttgacgtaagcgccgacgctcccctgagcggcagccttcagataccagtacatcgcttgcttatagtcctggtccaccccttcgccagcgttataatcccatgcaatttgaaactgggcgtgccgattaccctgctgtgcgcttttcaaataccagaatgcggcgagtgtcttgttttgagcaacgccttttccgtcttcataaagatcggccagattgttttgcgcgtcactatggccttgtaatgcagcttgtttgtaccagaaaaatgccagcgcatagtcttttgcgactccgttgccatttctgtacatccacccaagattattttgcgcataagacattccgctctccgcggctatctgataccagacaaccgcttctttataattgggggcttctccacgatccagtgtccagccaagggcgttggaagcgaaagtatggccttgtagggcagcttttttcagccagaagatggcttgctcattatctttatgacggcttttatcctcggtatacttttgccctaaggaatactgtgcttcacaatgaccttgctcagcggccagcttcagccagtaaaaggctttttcgtcgtccggagaatcaattgcgctatcgcgattataataaaacccaacaatatattgagcctcgcaatcgcctttttcagcacgttcgataatctcatctatacttaaattatcgcagcaactactcgtgaaaatcattatcatttccttatggttgcagataaaacatattatatttttatgtgttccatttttgcgtaagccttattttatgcgtattatgtcgcgtcagaaaagtataaataaacgagcctcgcaatgcggctaatattcatttaatgaatatttaaggataaattatatggacatggagagccaaaaaatattgtttgcactttccactccgatggaaatacgcaatgaatgctgtttacctagccatagtagtcccaaaatgtatttaggtacatgcttttttgacctttcttccagttggggaattgatgaccgtgatgacctgctgcgcacaattcaccgaatgatcgataacggtcatgccgctcggttggcagggttttatcaccgctggtttcgttatagcccatgtgaatggcgtgactatcttgctgaactaaatgagcaaggtcaggcttatgcgcaatttgtcgccagcaccgccgaatgctgtggcgaagggggaatcaaagcctgggattatgtccggatgggttttttaagccgaatgggcgtacttaataactggttgagcgaagaagaaagtctatggatccagagccgcattcatctacgggctctacgttattatagtaactggcggcaatactttgccggttatacctttggtcggcaatattggcagtctcccgaagatgatcatctgcctttattacgcgaattcttagcgcgtaaagaatacgacgattccggcaatgatatgttttatcaattatttgccagtgatgatgcgtattaccctaccttgtcctggcaaccattggcttactattctgcatgcccggaaacgcttaaggatatgagcgacctatgaaaaattgctggaagatcctcgatatagaggaaacgactgacgtcgatattatccgccgcgcttatctggcgctgttaccgtcctttcatccagaaaccgatccgcagggttttaaacaacttcgtcaggcgtatgaggaggcgctacggattgcgcagagccctgctaaatctgtttggcaaccagaagaatatgaggtagcagaacatgaaattctgctcgcctttcgtgcgttacttgcctctgatagtgaacgttttctgccctccgcctggcagcgattcattcagcaattaaattattgcagcatggaggagattgatgaattacgctggagcctgtgcacaatcgccatgaacactgcccatttatccttcgagtgcgtggtgttattagcagaaagattgcggtggttacaggaggaaaataccggggaaatagacgaagaagaactggaatcctttttatatgccattgcgaaggggaatgtttttaacttccagaccattctgcatctgcccgttgccgtgcaaaatgacaccatcgatttttaccaaatgttcgctcggatttggagtagccatccacaatggctgacattgtatttagcgcaacatcgcgcagtgattatccccgatgatgcaaaactgcacagaaatttactccgctggtatagcgcaggtcgcctggatatccccgaacttctggattacgcccagagttggcgggaaactgaacctgataatgaagatgcgccttattatgaatacgcgcaacgcgtctattgtggagaaggcgaaagcctgttggcagaactttgtgactactggcgcgagtatccctccacccaggcggatgctttaatgttgcaatggtgccgtcagcatcgggtcgattattacccattactggtgatgatgattgaagcgcgtgatctggttaacgatcagggaaaaccgctactttatgtccccggcgacagcgcccgtacgcgttttcatttatacgaaatactcagcgatgaaaaactctctgcgctggggcgtagtctggtcgagatggttttgcacaaaggacgtaagccgcggatcagtctcacgcgtgatacagaacataccttatggccattatatctagttgccaaacaattagtgcaggcctgccaacctacagaagaaagtttaatgccgattgtgagccgccttgatgcagaaaatcgttgtccactggaagcattaattattcgtcgattattaattcaggcggcgaattttaccgagaagcaaactgttgaaccggagccgcaaccgcagccaatgcccgttgacgatggtgggccaggctgtctgggcatcattaaaattattttctatatttttatctttgctggtttgatagggaaaatactccatctgttcgggtgacagtcgacgttaatgtgcgggaagcccggcaagtaatctttccgcatttttgtaatgttgtttggcggtcagttttaaccatttttgagattcataatggttaacattaataccactgccatttctgtagatcaaacctaaagtatattgagcatgagcatacccttgttcagctgcttccttataccagagaattgctttacgggtgtcgggtttgacccccagacctttgaggtagatccaccccagtttactttgcgcgcgtggattttcctgttccgcactttgctcataccagtatctcgcctgtgtataatccagtggtttaccgtcgctaccatgaagataaaattctccaaggcgatattggctcgtactgtgaccatgaatcgcggaaagctccgtggctgccgtggtgaatggaagactgcccggactgcttaaataatcaaaggcataattcaccatggctttatcacgcaacgtcgttttcttgggttggctaatacaggtaattgctgcaactataaaaattgcgaatatatacattaattttttattcatgtgtgaatgcttcgattttctttttattttgaaagcgtcaagtttatactcatcaataataaaaaagtagtcagttaatgcacttaagggattattaacaaatgaataaggaagaacaatatcttctttttgcgctttctgcgcccatggaaatacttaatcagggttgcaaacccgcgcatgacagcccaaaaatgtatactgggataaaagaattcgagctcagtagttcctggggaataaataatcgtgatgatttaattcagactatttatcagatgactgatgatggtcatgccaatgatttagctggcttatatctgacatggcatcgctcttcccctgaagagtggaaagcattaattgctggtggcagcgagagagggttgatttatacccaattcgttgcccaaaccgctatgtgctgtggggaagggggaatcaaagcctgggattatgttcgaatggggtttctgagtcgggtcggtgtgctcaacaagtggctgacggaagaagagagtttatggctgcaaagccgcgtctatgtacgagctcaccattactatcacagctggatgcactatttttccgcctatagcttaggacgtctctactggcaatcttctcagtgcgaagacaacactagcctacgcgaggcgctaaccctgtacaaatacgatagcgccgggagtcgtatgttcgaagagctggcagcgggaagcgatcgtttctatgccacgcttccctggcagccattaactgtccagtctgaatgcccggtaacgcttaaggatgtgagcgacctatgaaaacatgttggcaaatcctcgaaattgaaagcacgacgcaaatagacattatccgccaggcttatcttgctcgcttaccgttgtgtcatcccgaaaccgatccgcaagggtttaaagcattacgccaggcctatgaagaggccctgcgactggcggtaaatcctgtcgaggaagcagatgatgaagaaaaagatgctgccgctgaacatgaaatactacgtgcattcaggacattactggatagtgaaagtgatcgttttcagccttccgcctggcagaaatttattcagcaattaaatacctggaacatggaggatgtcgatcaattacgctggccgctgtgtgcaatcgccatagaagcgcgatatcttagtttaaattgtgcttctttgctggcagagcgtttgaactggcatagttttaatgacagcgaaggaatggatgaggaagaaagggaggcttttcttgaggccattcaggctggtgattgtttcgatttccttagccttctggaatatcccattgcgttgcagaaccagactgttgagtattacttcgcgctggaacgttgctgccgttaccatcctgactatgtcactgcgtttttggcgatggaaggtccgtggttaattcctgatgatgcaaagttacatcgcaaactgttgcgctggtacagcagcgtgcaaacaggtatggcggaactcattcctgtcgctcaacagtggcaaacggaagaaccagaaagcgaagatgcccggtattacttgtgtgcacaacgtttgtactgcggcgagggggaaagcctgcttgccgatctctgcgcgtactgggaaagttacccatctacacaagctgataatttgttgttgcagtggagcaagcgtcattgcccggattatttcgcgttattagtgatggttatcgaagcgcggagcatggtagatgcgcaaggtcaaccgctgaaatatgttcctggtgagagcgcccggacgcggctgttatgggcggagattttacatagcggaaaattaagcccgttaggtcaaagctttattgagagcttattcttcaagcgcaaagcatgggcgtggtggaaaagcagagtcggtagcgagacagagcaagatagtccgttcctggatttgtatcgggtagcggaacaggtagtacttgaagcgtttccgaaacaagagatgctggcccgtcttaatacaaggctggaaggcggagatgctcatccattagaggccattgtcacccggatgcttttgacgaaagtgaaactcgagccggaggatgaagatgtcgatgagccaacacctgaaaatcatgaagaaaaaaatgatgagggtgaaaaaccacagagcattaccagcattatcaaaatcagtttaacggtgctggtgataggttatgctctcggcaaaatcgcgatgttgtttagctgacgatgtgttttttgcgccgatgccggatgcagcgtttacgccgcatccggcagccgtgtttatgggatctcaatggctaaataatcgctcgcccgccgccgaacttcatccacgcgggccatatcgttactctgcaacgccgcatcaaaatcggtgatcacccggccgatctcttctcgctcgtcacccagcgcccgcgcccacaactcttccagtttggctttaaaggtgcgattgatgagcatatcgcgcggataaattttcaatgcggataaccgcgtccgactctcttcaatctgctgcgcgctcaatgttaccgggctgtggttaatcactctggacttaacgctgccgtcttccagaagcacgtcaacttcaagcaacccgttgatatcataactaaagcgaatatcaatgctctgataagccccggttttcttcaacggcacatcgaaggattccaccagaatgttgtttttaactttgtggttttctccctgatagacgttaaccgtaatactatcctgttccgggtgcatggtactataagtttctacacggctcacgggcacagtggtgtttcgttcaataatcgggctgaaaatgccggaaacgccctggcggttaacttcaacgcccaagctgtaagggcaaatatcagtgaggattacctcttcaatatcttcactgcgtaagcggcaggcggcctggattgctgcgcccagcgcgacaatggtgctcggatcgtaactttgatacggtaatttgccaaacagacgcacggcgattcgctgcaccagcggcatttgactcgcgccgccaaccagcaccagactgtcgatttgactcggcttcagacgcgcatcgcgcaacgcctgttcaatcggcactcgcaagcgattgagcagcggcaaccacaaatcttccagttcgttctcgtaaaattcgcattcccgcgtttcttcctgatactgccagcgaatgtgcaatgggctttgattgctacattttgccgcttccacacaggcgtacaaggctgccagttcactctcgttaagcgtggtcctggcgacatccgcgcgttttaaaacctcatcgaccagcatatgggtaaaatcttcgccaccaagaaagttgtcgccagcggaggcgtgaacttcaatcaccggcgtggcgtactcaagcaccgtaacgtcaaacgtgccgccaccgagatcaaacaccaggctacgggtattttgttgggtatgcaggccatacgccatcgcagctgctgtgggttcattaattaagcgtaccgcatttaacccggctaactccgctgctaaacgggtatgcttgcgttgttcatcgctgaaataagccggaacggagatcaccacatctttaatcggacgttgcagaaattcttcggcatcttcttttaaactgcgtaataccaaagaggacagttctggcgcgttaaatgtgtcgctgcctaaccgccagttggtattactgcccattgcacgtttaaataacgctgccgttttatccggatggctagtacgccgacttacagccggttttccgactaaaatatgattattttcatccatgctaattatggatggtgttaaatattcaccgaacttatttggaattaattgcgcggcaccgtctttccagacggcaattaaactattggtagtaccgagatcgataccaatggcgagttctgcattatccattgcatttatatcttgaaagaaaaagagataaacagattaagaccacccaggtaacgcgtggtgatcttaatcaatgacgtgtgttaagcgtaaaatttcagacgatcagccagtaaatcaacaaagccctgacgatcaacatcgaccattacggtggcattcggtttattgcctgtcagataataataatcaacaaccgtcataccctgggtatatttcccctgtgtttccacgccaacccagcgctcaacagaggtaaataactccggtttcaacagccaggcgatggtgcatgggtcatgcagtggtgcgccgacaaagccccatttttcgtctttatgatattcgaggaagaaatccagcagttcggcaacaatggtactaacagggttaccaatcgcgcggaaacgctcggtgtcttcaacgtggatttgtgctttatgagtaacatccagaccggccatcaccaccgggatcccactctggaagacaatttctgccgcttccgggtcaacgtaaatattaaattcagccgcaggcgtccagttacccagccccatagcgccacccataatcacgatacgggcaattttgctatgcagttccggatggctattgagcagcaaggcaacgttagtttgcggtccggtagacacaatggtgacaggttccgcactttcacgcagcgttttcgccatcagctctaccgccgtacagttttgcggtgcgaatgtcggttccggtaatgccgggccgtcgagaccgctttcgccgtgcacattgtccgcgataatcaactcacgcattaacggttttaccgcgccgcctgctaccggaatatcggtgcgattaagcaaggtcagcatacgcagaacattgcgtaaggttttttctggtgtctggtttccggcggaagacgtaattgctttgacatcaagctctggactggcgagggcgagaactattgcgatagcgtcgtcatgacctgggtcgcaatctaacagaattggcagtgccattgttgctccttgttgtgtgcttctttgcgacaagggtaacgccaggatgtaacagatacgaggggcgaaacgataaagcgtgagatggcgcgcaattgggtatgcgcgccagagtgattaatgcaggattttcgcgaggaagtcttttgcgcggtcgcttttcggatcatcgaagaaagcgtctttcgggctgtcttcgacaattttaccctcgtccataaagatcacccgattcgccactttacgggcaaagcccatttcgtgggtcaccaccatcatggtcattccttcgttcgccagttccaccatcacgtccagtacttcgttgatcatctccggatccagcgcgcttgtcggttcgtcaaacagcatcgcaataggatccatacacaacgcgcgagcgattgccacacgctgctgctgaccgccggaaagctgcgccggaaacttattggcgtgagcagaaagcccgacacgctccagcagtttcagggctttttcacgagccggcgctttatcgcgtttaagcactttcacctgcgccagggtcaggttttcgataatgctcagatgagggaacagctcgaaatgctggaataccatcccgacgcgggaacgcagctttgccagatcggttttcttgtcgttaaccacgataccatcgacggtgatttcaccttgctgcaccggttcgaggccgttgacggttttaatcagcgtacttttgccggaaccagacgggccgcaaaccaccaccacttcgccttttttcacttcggtactgcagtcggtcagcacctgaaagtgaccataccatttactaacatttttcagggtaatcattatgctgtccttcttttcaagtagctgaccaacaagctcgcgctaagactaataacgaaataaacaaatccggcaaacaggatcatctcaacctgcgtaccatcacgctcaccaatggtactggcggtacggaagaaatcggccagggataacacatacaccagactggtatcctggaacagtacgatgccctgagtgagcagcagcggcaccatcgcgcggaacgcctgcggcagaataatcagtttcatgctctgccagtgagtcattcccaacgccagcgcggcgctgctttgaccacgagaaatactttgaataccagcacggataatctcactatagtaggccgcttcaaacatgctaaacgccaccatcgcgctaattaaacggatatcattttttgggcttaatcccagcacgttttgcagaaaacccggcacgatcaggtaaaaccacagcaaaaccataactaaaggaatgctgcggaatacgttaacgtaggctttggcaaaccacgccacgggcgcaaagctggataaacgcatcaccgccagcatcgtgccccacaaaataccaatcactaccgccgtgacggtgattttcagggtgatcaccagcccgtcgagcagatatggcagggaagggacaatggaactccagtcaaactcgtacattatttgccccccatgttgccaggcaggcgaactttacgttcaaccagcgtcatcaccagcatgataaaagcgttaatcaacacatacgccagcgtaatggcggtaaagctctcccaggcatgggcactgtaatcgagcaatttacccgcctgcgccgccatatccaccagaccgatagtgctggcgatggcggagtttttcaccaggttcatcatctcactggtcatcggcgggacgataacgcgataagcattaggcagcagtacgtatcgataagcctgcggtagcgtcaggcccatcgccagcgcggcatttttttgccctcgcggcaggctctgaatcgcggcgcgtacctgttcgcaaacacgggcggcggtaaacagccccaggcagagcatggaactaaggaaaaactgaatattgggatccagctcggccttaaaccacatgccgattttctccggcagcagctccgggatcaccagataccaggtaaagaattgcacaatcaacggcacgttgcggaacagttcgacatacaacgtacccagaccagagagaaaacggtttggaacggtacgtaaaatgccgaaaaaactaccgacgaggaaagcgataatccaggcgcagatgctcaaagcgatcgtcacctgaaaaccactccagatccaaccaagataggtggtgttgccgaacggggcttgttgtaaaaaaataccccagttccagtctatagacataaatctactccagaaaaaagagggtagcagcgttaactgctaccctcgaagattgttacccagcgtattgcggttttcaggcccgatggggaacgaccatcaggcgtatagtctgtccgtgctacgtaacaatcgagagggctggaatttccgcccctggttcttgtaattagttcagtgccttgtcattcggttctttgaacagtgctttcatttcgtcactcagttcgaaattcatgttcaggtttttcggcggaattggatttttgaaccacttatcaaaccatttttccgcttcaccggaggtctgcacctgagcgatggtgtcatccatcagctttttgaactgcggatcatctttacgcaacatacaaccgtaggcctcctgagactgcggcttgccgacgatttcccagttgtctggtttcttcgctttcgcacgttcaccggccagcagagcgtcatccatcataaaggcaacggcacgaccgctttccagggtgcggaaagagtcaccgtgatctttggcgctgatgatgcgcatattcattttttgctcttcattcagtttgttgagcaaaacttcagaggtagtgccggaagtgacgactacggctttgtctttcaggttggcaaaatctttgatatcgccaccctttttggtcaacaggcgcgtaccgaccacgaaaatagtgtcagagaaagccgcctgtttttggcgttcgacgttgttggtggtagaaccacattcaaaatcgaaagtgccgttttgcagcagtggaatacggttttgactggtaatcggaatcagttttacctgcaagtccggtttgttgagtttctttttcactgcttcaacaatggcgttggagtaatcctggctgtaacccaccactttttgctgattgtcgtaataagagaaaggcacactagattcacggtgaccgacgacaatcacaccgtttttggcgattttgtccagagtactgcccgctgccggggcggcgtcatctgcctgtgccagtcctgcggaaagcgccagggcgaggattgctgtggcaggtttacgtaattgcatatccaactcctttatcttctgcgttaagaacgcatggatacccgttgtgagtgtttgtgttgttatcgtctgcaactttattgtgcagtgttgtgcctgttagggaaggtgccttaggtaacatttagtttggctaaatgtaaagatattgctgttttattgtttgtttttgcgagatgcgccgcaccattccgaagcaaaattcttaaaatgcactcttttagtgctaccgctggattactgtggtgcaactaggttgtactgatgctgtttcagggtttgccttgtataacaaagcaatagatgtgccaaagttggataggagaatattgttatccggataatgcactgatgccgcatccggtgagcgtgccgaaatatgggatgtattccggcacgataagaagggattatttacgtcgctgacgcagactcatcaacacagcagcaaaaccaaacaatgccgtcagcacccacagcggccagttgccggtacgtgcgtatggtgtgagtccggtggtcggcgtcacgttagtggttaacacctcgcgggtgaactgcgggatcatcgcctgaatctcaccctgcgggccaatcaccgccgtaatgccgttgttggtgctgcgcaacagtgggcgcgccagctccagcgcacgcattcgcgccatctggaagtgttgccatggaccaatagatttaccaaaccacgcatcgttggagatagtcagcagatagtcggtatccgggcggaagttatcgcgcacttgctcgccgagaatgatctcgtagcaaatagccgcagtaagctcaataccatttgcgctcagcggcggctggatatatggcccacggctgaagctgctcatcggcagatcaaagaacggtgctaacggacgcagaatgctctccagcgggacaaactcgccaaacggcaccagatggtttttgttatagcgatcggcactttcgtagctgtacggcgcacctttacccagcgtgatgatggtgttgtaggtatcgtagcggttctgcttattgagacgcgcgtcgacaatcccggttaccaggctgctacctttatcacgcaactcaccgtccagtgctttgaggaacggttgctgattaatttccagatcggttatcgcgctctccggccagataatcaagctacttttgcccatcagcggtgccgttgcgttgtagtaaatcttcagcgtattaagaagctggccttcgtcccatttcaggctttgcggaatatcgccctgaaccatgctaacctgaatggttttctccggttgtggggtaaaccactggatgtaacgcagcgggaagggaagggcaaacagcacgacggccaccaccagcggacgccagttgcgtttgaccaacgccagtgccagcaggccactaaccatcatcagcaggaagttaatggcttccacgcccattatcggtgccagcccttttaacgggccatcaatctggctatagccgaactgtaaccacgggaagccggtcagtacccaaccgcgcagaaactcggtcacttgccagagggcaggggcggcaatcgctacgcgcagccaggtggttttcggccacagacggctcagcacgccagcaaacagtccggtatacaggctcaaatacgccgccagcagcaccaccaggaagatgttaaccgggccaggcattccgccaaaggtcgcgatgctgacatagacccagttaataccgctgccaaagaggccaaatccccagcaaaagccaatagcggcagactggagtggacggcggttaaaggtcaacgcctgaagccccatcaggctaataatcgccgcaggccagacgtcgtaaggagagaaggccagcgttccgcaggcaccgaataataacgccagcagcaggcgaatgcgctggcgttcaattaaactggcaaaagccatgtagttatctatccagtttcggttttattcatccagcttcggctggggactgtcatccgggattttgacatgaacctgaataatacgccgactgtcggccatcgccactttgaactggtaaccgtcgatgtcgatagtttcgccacgcgccggaagatgcccaaatgcctgcatcaccagaccaccgatagtgtcgacttcttcatcgctaaagtgggtgccgaacgcttcgttgaagtcttcaatggaagccagtgcgcgtacggtccaggtatgacgactcagctgacggaagtcgatatcatcttcttcgtcatactcgtcttcaatctcaccaacaatcagttccaggatgtcttcaatggtcaccagaccggaaaccccaccgaattcgtcaataacgatcgccatgtggtaacgctgagagcgaaactctttcagcatccggtctacgcgcttactttcaggaacgacaaccgcctgacgtaacactttgtccatgctgaaggcttcagcatcgctgcgcataaacggcagcaagtctttcgccatcagaatcccttcaatgtgatctttgtcttcgctaatcaccgggaaacgactgtgggcggactcgatgatgacatcaagacattcgtccagcgtctggttgcgtttcagggtaatcatctgggagcgggggatcatgatgtcgcgaacgcgttggtctgcgatgtccatcaccccttcgagcatatcgcgcgtatcttcgtcgataaggtcgttctgcccggaatcacggatcagcgccagcagttcgtcacggtttttcggttcaccgtggaaaagttggctgagtaacagggagaaaaatcccttcttgttgcttatcgtgtcactactgtgactattgtcgtcgctcatggcgtcgtatgggttctcatgttagttaatcaaaacgccgtcgttaatcaccaacggcggggacgtctgccagtcaaatgcctggcaaattattctttctcggcaatgtacggatcctcatagcccagagcaagcataatctctgtttcgagggcttccatttcttctgcttcgtcatcttcgatgtgatcgtaacctaacaaatgcagactgccgtgcaccaccatatgcgcccagtgcgcctccagtggtttgccttgctcctgagcttccttctcaaccacctgacggcagataaccagatcgcccagtaggctcatttccatgccaggcggcacttcaaacgggaaggagagcacgttggtcggcttatccttaccgcgataggtcagattcagactgtggctttcggcggtatcgaccacgcgaatcgtcacttcgctttcttcctgaaactgcgggatcaccgcattcagccatgtctgaaactggctctcttccggtaacccggaattatcttcacatgccagttgtaaatcgaggatcacctgactcatttttgttcctgttcttcgcgcttgcgttctgctgccagcgccgcttttcgtttttgttcggcttcttcccaggcttcataggcgttaacgatacgcgccaccacagggtgacgaaccacgtcttcgctgtggaagaagttaaagctgatctcttcgacatcggccagcacttcgatggcgtgacgtaagccacttttagtattacgcggcaggtcgatctgtgtgacgtcgccggtgataaccgctttactgttaaaaccgatacgggtcaggaacatcttcatctgttcgatggtggtgttctggctctcatcgagaatgataaacgcgtcgttcagcgtacgaccacgcatataggccagcggtgcgacttcaataacgttgcgctcaatcagtttctcgactttctcaaagcccagcatttcaaacagcgcgtcgtacagcgggcgcagatacgggtctactttctggcttaaatcgccaggcaggaagcccagtttctcaccggcttctactgccggacgagtcagcagaatacggcgaatttcctgacgctccagggcatcaactgccgcagccactgccaggtaggttttacccgtacccgccgggccaacgccgaaggtaatgtcatggtcgagaatattggcgatgtactgcgcctggtttggcgtgcgcggcttaattacgccgcgtttggttttgatattgaccgctttgccgtactccggcacgctctccgcgctttgctccagtacccgcgcttctttaatcgcaaggtggatctgttccggttcgatatcctgaatctgaccgcgcatcggggcagtatcgacatacaggctacgcagaatgtctgccgcagcggtgacgcaaatcggacggccggtcagtttaaagtggttatcgcggcgattgatctcgatgccgagacggcgttcgagctgcttgatgttgtcatcaaacgggccgcacaggctcaacagacgcgcattgtctgctggctccagggtgatttcgcgagtgtctatgttcaaaccgttcctcttatctgtatgccgccggaagctgaacattcaccggcctataaggaaattattcacgccacaggaaaaaggcgcaagcattgcaataaagatggggataaagagagaaaaaacaaggcccaccggaacggcaggcctgagaattacggctgataataacccacgccaaggtcgttttctttgcgggtacgggcaatcacactttccggtgtttctgccacgcgcagacccatttcatcttcagtacgcaccactttaccgcgcagagagttcgggtagacgtcggtaatttctacatcgacgaatttaccgatcatatccggcgtgccttcgaagttgaccacgcggttattttccgtacgcccggaaagctccatgatgctcttacggcttgtaccttctaccagaatacgctgggtggtgccgagcatccggcggctccacgccatcgcttgctgattaatgcgctcttgcagaatatacagacgctgcttcttctcttcttccggaacatcatcaaccatatcggcggctggtgtacccggacgtgcagagaagataaagctgtagctcatgtcgaaattgacgtcggcaatcagcttcatcgttttctcgaagtcttcggtggtttcgccagggaagccaacgatgaaatcagaactgatctgaatatctggacgcgccgcacgcagtttacggatgatcgctttgtactccagcgccgtatgggtacggcccatcaggttcagaatgcgatcggaaccgctctgtaccggcagatgcaggaagctcaccagctccggcgtgtcgcgatacacttcgatgatatcgtcggtgaattcgatcggatggctggtggtaaagcgaatacgatcgatcccgtcgatcgcagcaaccagacgcagcagatcggcaaagcttccggtggtgccgtcgtagttttcaccacgccaggcgttcacgttctgaccgagcaggttgacttcacgcacgccctgagccgcaagctgggcaatctcaaacagaatatcgtcggacggacggcttacctcttcaccacgggtgtaaggcaccacgcagtaggtgcaatatttattgcagccttccatgatggagacaaacgcggtcggcccttcggcgcgcggttccggtagacggtcaaacttctcgatttccgggaagctgatatctacaaccgggctgcggtcgccacgcacggagttgatcatctccggcagacggtgcagcgtttgcggcccaaaaataatatcgacatagtgggcgcgctggcgaatgtgctcgccttcttggcttgccacgcagccaccgacgccgataatcaggtctggattcttctcttttaacagtttccagcgacccaactgatggaagactttttcctgagccttctcgcggatactgcaggtgttcagcagcagcacatccgcttcttccgccacgtcggtcagttgatagccgtgggtggcatccagcagatcggccatcttgctactatcgtactcgttcatctgacagccccaggttttaatatggagttttttggtcatcgacttgctcttgcgaaatagtagccaggaatgcagggcgcatagtgtaatgctttgctgccgttgtgaccagtatgagcgttatcagcccttaggggtaaaaatcctgtaaacttaaagcatattgctaacaggatgattgaccatgacaaatcaaccaacggaaattgccattgtcggcggaggaatggtcggcggcgcactggcgctggggctggcacagcacggatttgcggtaacggtgatcgagcacgcagaaccagcgccgtttgtcgctgatagccaaccggacgtgcggatcagcgcgatcagcgcggctagcgtaagtttgcttaaagggttaggggtctgggatgcagtacaggctatgcgttgccatccttaccgcagactggaaacgtgggagtgggaaacggcgcatgtggtgtttgacgccgctgaacttaagctaccgctgcttggctatatggtggaaaacactgtcctgcaacaggcgttgtggcaggcgctggaagcgcatccgaaagtaacgttacgtgtgccaggcagcctgattgcgctgcatcgccatgatgatcttcaggagctggagctgaaaggcggtgaagtgattcgcgcgaagctggtgattggtgccgacggcgcaaatagccaggtgcggcagatggcgggaattggcgttcatgcatggcagtatgcgcagagctgcatgttgattagcgtccagtgcgagaacgatcccggcgacagcacctggcagcaatttactccggacggaccgcgtgcgtttctgccgttgtttgataactgggcaagcctggtgtggtatgactctccggcgcgtattcgccagttgcagaatatgaatatggcacagctccaggcggaaatcgcgaagcatttcccgagccgtctgggttacgttacaccgcttgccgctggtgcgtttccgctgacgcgtcgccatgcgttgcagtacgtgcagccagggcttgcgctggtgggcgatgccgcgcataccatccatccgctggcggggcagggagtgaatcttggttatcgtgatgtcgatgccctgattgatgttctggtcaacgcccgcagctacggcgaagcgtgggccagttatcctgtcctcaagcgttaccagatgcggcgcatggcggataacttcattatgcaaagcggtatggatctgttttatgccggattcagcaataatctgccaccactgcgttttatgcgtaatctcgggttaatggcggcggagcgtgctggcgtgttgaaacgtcaggcgctgaaatatgcgttagggttgtaaccttacaacattgccggatgcgtgccaaccgtaggtcggataagacgcggcagcgtcgcatccgacattgaaggataagacgtgtcaacatcgcattcgacattgaatgaacgcagaaaagcaaaaagctcgccgaagcgagcttttttaatgtggctggggtacgaggattcgaacctcggaatgccggaatcagaatccggtgccttaccgcttggcgataccccaactgggtgcacttacaaggtaagcgtcttgaataaattggctggggtacgaggattcgaacctcggaatgccggaatcagaatccggtgccttaccgcttggcgataccccaacaaattggttttgaatttgccgaacatattcgatacattcagaatttggtggctacgacgggattcgaacctgtgaccccatcattatgagtgatgtgctctaaccaactgagctacgtagccagattgtttcttcgatggctggggtacctggattcgaaccagggaatgccggtatcaaaaaccggtgccttaccgcttggcgataccccaataaccgggcggtgaaccgcttactcgaagaagatggctggggtacctggattcgaaccagggaatgccggtatcaaaaaccggtgccttaccgcttggcgataccccatccgtacaacgctttctggtgaatggtgcgggaggcgagacttgaactcgcacaccttgcggcgccagaacctaaatctggtgcgtctaccaatttcgccactcccgcaaaaaaagatggtggctacgacgggattcgaacctgtgaccccatcattatgagtgatgtgctctaaccaactgagctacgtagccatcttttttttcgcgataccttatcggcgttgcggggcgcattatgcgtatagagccttgcagcgtcaacctctttttcaaggaaaattgctcgaaagtgactgtttggttaggttgcgaacagcgtggcgctatattcgtcaattattgtttactttgtgttttttcccaccctacagccattcttttgtcatacaggatgaaattcggaatttaacaatagtggtgggaaattaatctatgaaatactggcctacagtgatgagttgtcaaacagtgatgtggcaaacccggaacatttccttactgcatatcagaatcaacaagcacctcaataactgaaacagccccggatttcaccggggctgtttcgcatttcttacttatacgcgctctggtgaacaccaaccgcgcgaccagacggatcgtccattttcttgaacgcttcatcccattcgatcgctttagcggaagaacaagcgacggaaggaccgcccggcacgcactcagcggcgctcggaagcgggaatagttcttcaaagatctcccgatacaagtacgcttctttagaggttggcgtgttgtacgggaagcggaagcgggcagtttccagttgctgatcagaaacctgctgcgcagccacttctttcagggtgtcgatccaactgtaaccgacgccatcggagaactgctctttctgccgccaggccacgcttgcaggcagatacgcttcaaaacattcacgcaggatgtgtttttccattttgccgttaccgcacattttatcctgtgggttaatacgcatcgccacatcaaggaattttttgtcgaggaacggaacgcgtgcttccacgccccaggcactcatcgctttgttggcacgcgcgcagtcatacatatgcagggccagcagtttacgcaccgtctcttcatgcagttctttggcattcggtgctttgtggaagtaaagataaccgccgaacacttcatcagaaccttcaccggacagcaccattttaatgcccatcgccttgatcttacggctcattaaatacatcggtgtactagcgcgaatagtggtcacatcataagtttcgatgtggtaaatcacgtcgcggatggcatccagaccttcctgtacagtgaagtgaatttcgtgatgcaccgtgcccagatggtttgccacttcctgggctgctttcagatccggactacccggcagacctacagcaaaggagtgtaactgcggccaccaggcttcagagcgttcctgatcttccacgcgacgggctgcgtatttcttggtgatagcggaaataatactggaatccagaccaccagaaagcagcacaccgtaaggcacatcagacatcagatggcttttaacactatcttccagtgcctgacgcagctcgtttttgtcggtcacgttatctttcaccgcatcgtagtcgaaccagtcgcgatgatagtaagaacggatttcgccgtcctggctccacaaatagctccccgccgggaactctttaatcgtgcggcaaactggcaccagcgctttcatttcactggccacatacagctgaccgtgttcgtcataccccatatacagtgggatgatccccagatggtcgcgaccaatcaggtaggcatctttttcgctgtcgtacagtgcaaaggcaaacatgccctgcaagtcgtcgagaaattccggccctttttcctgatacagcgcgaggatcacttcacagtcagacccggtctggaactggtaacgatcgccatattcggcgcgcaatgcctggtggttgtagatttcaccgtttaccgccagtacgtgggttttttgttggttgtagagaggttgcgcccccgcgttaacgtcaacaatactcagacgttcgtgggcgagaatggcgttatcgctggcataaataccggaccagtccgggccacgatgacgcatcaggcgactcagctcgagggctttcttacgcagctcaactgcgtctgttttgatatcgaatacgccaaaaatactacacataaccttctccgttaacctggtatttgttgcttgttgtgtttgcttgtttaaaaaaatgccgcaaagcagcactgtgcgcaagcgatttggcggtgaaaaaataaaaaacgtaatggtgattgtcgattggtgaaaaaaggtctggtgtgaggatatatttattgatgaatcgataatttttagcgggttttattgaatgtttatattttacgggggccaaattgctgacaaagtgcgatttgttcatgccggatgcggcgtgaacgccttatccggcctacaaaagcatgaaaattcaatatattgcaggagctgcgtaggcctgataagcgtagcgcatcaggcagtttggcgtttgtcatcagagccaaccacgtccgcagacgtggttgctattcagataacgtcgatttcagcgacactcgggtaaatccagctggggcggaaaggcatactgtcgatatcgtcgaggctgctaacaccagaaagcaccagaatcgtctccagacctgcctggaagccggccagaatatcggtacgcaggttatcgccgacaatcaccgtttcttcgctatgcgcctgcattttgtttaatgctgcgcggatgatccacgggctgggcttaccaacatagaacggtttgcgcccggagattttctcaatccctgcacacaacgcgccacaagcgggataaaaaccgcgcccgtgggtgtccggattggtggcgataaaacgtgcaccgttagcgacgaaataggctgctttatgcatcatgtcccagttgtaggaacgcgtttcgccaacaatcacgaaatcagggttcacatcggtaatagtgaaaccggctttgtacagttcatgaatcagtgcgccttcgcccaccacatacgctttcttgccttcctggcgacgcaggaaatcggcagtcgccatcgcagaggtataaaacacgctgtcaggtacatcgacacctgcggtggcaaagcggttcgccagatcttgcccagtctggctaggatagttggtcagcaacaccagcggcaggcctttatccataatcccgtgcaaaaattccgctgcacccggtacggcgacgttatcgtgcatcagcacgccgtcgatatcgcaaattacatttttaatggtcatggactacccagaatattgacaacaataagcgccactataaaagcacattaattttccagcaaatgctggagcaaaataccgttgagcatggcgcgttttaccagcgcaaaagcgccgattgcgctgcggtgatccagctcagaacgtaccaccggcagattagtgcgaaacgccttcagcgcctgggtattaatgcagctttcaatagcagggagcagcactttatcggcttcggtgatttcaccggcaataacaattttttgcggattaaataagttgatagcaatggcgatggttttacccagatgacgaccgacatactcaattacttcgctcgccagactatcgcctttgttcgcggctttgcagatagttttgatggtgcagtcgtccagcggcacgcggctctggtagccctgctttaacagattcaacacccgttgttcaatggcagcgttggcagcgatagtttccaggcagccaaagttgccgcagtggcagcgttcacccagcggttcgacctgaatatggccaatttcaccgacgttgccgttgcggccaataaaaatgcgcccgttagagataatcccggccccggttccgcgatggacacgcaccagaatggagtcttcgcaatcctgacttgcaccgaagtagtgctccgccagcgccagactacggatatcgtgaccaacgaaacaggtcactttaaaacgttcttccagagcttctaccagcccccagttttctacctgaatatgcggcatgtaatgaattttgccgctgtccgggtcaacaagccctggcaggatcacgctaatcgcgatcagctcgcgcagtttgcgctggtagctatcaataaactgagcaatggcattcaacagggcatgttccagcgtttgctgggtacgttccggcagcgggtaatgttcttctgccagcactttgctgctgagatcaaacagagtgatggtggcgtcatgacgaccaagccgtacgccgattgcgtggaaattgcgggtttcggtgacgatggagatagcgcggcggcccccggtggaggcctgctgatcaacttctttgatcagcccgcgttcgataagctgacgcgtaattttggttacgctggcgggggcaagctggctttgctcggcaatctgaatccggctgattggcccgtactggtcaatcaggcgataaaccgccgcgctgttaagctgttttacgagatcaacattacctatctgagcttgtccgcctggtgtcatactttctcttattgagttacgacctcgttaccgttaacgatggtcttggtgattttaaaatcaggtgtgaatgcagtcaggttggctactttacctgcggcgagtgtgccgagacgtttctcaacgccaatcgcacgcgccggatagagcgtcgccatacgtagcacttcatccagtgcgataccgcaatgttcgaccagattacgcacgccttcaatcatggttaaggaactaccgcttaacgtaccgttctcatccacacaaagtccgttacggtagtatattgttttacccgcaaaaatgaactgttcaatgttggcacctgctggcgcggtggcgtcagtaaccagacacagtttgtcgcctttcagacgtttagcgttgcgaatgttggcgtaatcaacatgcaggccatcagcaataataccgcaataaatgtcagcttcgtcgaggatcgcgcccgccaggccaggttcacgaccggtaatatacggcatcgcgttgtacagatgggtggcaaaggtaatccccgcgcggaaaccggcttttgcttctttcaacgtcgcgttggagtgaccggcagaaaccacaatcccggcatttgccagtttgctgatgacttccgcaggaaccatttccggtgccagggtcactttggtaatgacgtcggcgttttcacacaggaaatcgaccagcgcggcatcaggcttacgcacaaaattcggattatgggtgcctttttttaccagattcagccacggaccttccagatgcagacctaacgcctgattcggatgttttgccaggtactcgcgcataacgcgcacgccctgtttcatcagctcatcgctggtggtgataagcgtcggcagatagttagtacagccacttttctcattggctttctgcatgatttccagcgtttccacgctgaccgcttcagcggtgtcgttaaactgtacgccgccgcagccgtttaactgcacatcgataaaaccgggggagagaatggccccgttcagactacgttgttcgatctctggcggcagttccgctaccggacagacgcttttaatcaggccatcagcgataacaaccgcgtggtcatcaagaaattcgtggccggtaaagatccggccctgggttaatgcatacattctgacccccgattttaaaaaatattgccctgagcaaggagccagggcagggataacaattacagacctttgatattttctgcttctaattcattgaaatatcttaaagtcttaactttcagctccatggtggaaggttcatcgcacaccatgatcgctttcggatgcagttgcagacagctgatggtccacatatggttcacgcaaccttcaacggcggcctgcagcgccagtgctttctggctacccagcaccagaatcatcacttcttcggcatccagcagtgtaccaacaccgacagtcagggcatattttggcacctgattaacatcgttatcaaagaaacgagagtttgcgacgcgagtgtcatgagtcagggttttgatacgagtacgagaagccagagaagacgccggttcgttaaatgcaatatgaccgtcgttacctacaccgcccataaacagatgaatttttccgtaagaacggattttttcttcatactggcggcactcggcgtcgatatccggggcgttgccgttgagaaggttgatgttttctgctggaatatcaacgtgatcgaagaaattacggtgcataaagctgtagtagctttccggatgctctttcggcagaccgacatattcgtccatgttgaaggtgacaacgtgcttaaagctgacctggcctgctttatgcatttcgactaacgctttataggtggtcatcggcgtgccgccagtcggcaggcccagtacaaacggacgatcggcagtcggtttgaacgcattgatacgattgacgatatggcgagcagcccatttgccgacctgttcagcggtagtcagggggatcagtctcattattcacctcaataagtaaaatgtaagccgttggcggattaggcatctttaagcgtaacctggatttgcgcagacaggcgtcaatccgacctgattttttgaatgataaaataagttttctggtttagccagtaaaagggagtgataataacgatatttggtgacaaaactcacaaaagacacgcgtttaatttgcgatacgaattaaattttcacacactctgtagcagatgatctaacaatctgattacagaacatcggcagtacaatttgcagcaaaataaaaatacggcttgaaacgagccaaatagggttctcgtagggggaataagatgaatattttaggttttttccagcgactcggtagggcgttacagctccctatcgcggtgctgccggtggcggcactgttgctgcgattcggtcagccagatttacttaacgttgcgtttattgcccaggcgggcggtgcgatttttgataacctcgcattaatcttcgccatcggtgtggcatccagctggagcaaagacagcgctggtgcggcggcgctggcgggtgcggtaggttactttgtgttaaccaaagcgatggtgaccatcaacccagaaattaacatgggtgtactggcgggtatcattaccggtctggttggtggcgcagcctataaccgttggtccgatattaaactgccggacttcctgagcttcttcggcggcaaacgctttgtgccgattgccaccggattcttctgcctggtgctggcggccatttttggttacgtctggccgccggtacagcacgctatccatgcaggcggcgagtggatcgtttctgcgggcgcgctgggttccggtatctttggtttcatcaaccgtctgctgatcccaaccggtctgcatcaggtactgaacaccatcgcctggttccagattggtgaattcaccaacgcggcgggtacggttttccacggtgacattaaccgcttctatgccggtgacggcaccgcggggatgttcatgtccggcttcttcccgatcatgatgttcggtctgccgggtgcggcgctggcgatgtacttcgcagcaccgaaagagcgtcgtccgatggttggcggtatgctgctttctgttgctgttactgcgttcctgaccggtgtgactgagccgctggaattcctgttcatgttccttgctccgctgctgtacctcctgcacgcactgctgaccggtatcagcctgtttgtggcaacgctgctgggtatccacgcgggcttctctttctctgcgggggctatcgactacgcgttgatgtataacctgccggccgccagccagaacgtctggatgctgctggtgatgggcgttatcttcttcgctatctacttcgtggtgttcagtttggttatccgcatgttcaacctgaaaacgccgggtcgtgaagataaagaagacgagatcgttactgaagaagccaacagcaacactgaagaaggtctgactcaactggcaaccaactatattgctgcggttggcggcactgacaacctgaaagcgattgacgcctgtatcacccgtctgcgccttacagtggctgactctgcccgcgttaacgatacgatgtgtaaacgtctgggtgcttctggggtagtgaaactgaacaaacagactattcaggtgattgttggcgcgaaagcagaatccatcggcgatgcgatgaagaaagtcgttgcccgtggtccggtagccgctgcgagtgctgaagcaactccggcaactgccgcgcctgtagcaaaaccgcaggctgtaccaaacgcggtatctatcgcggagctggtaagcccgattaccggtgatgtcgtggcactggatcaggttcctgacgaagcattcgccagcaaagcggtgggtgacggtgtggcggtgaaaccgacagataaaatcgtcgtaagtccagccgcagggacaatcgtgaaaatcttcaacaccaaccacgcgttctgcctggaaaccgaaaaaggcgcggagatcgtcgtccatatgggtatcgacaccgtagcgctggaaggtaaaggctttaaacgtctggtggaagagggtgcgcaggtaagcgcagggcaaccgattctggaaatggatctggattacctgaacgctaacgcccgcagcatgattagcccggtggtttgcagcaatatcgacgatttcagtggcttgatcattaaagctcagggccatattgtggcgggtcaaacaccgctgtatgaaatcaaaaagtaatctgctttatgcctgatgcgacgcttgagcgtcgcatccaacaatgacaagcggtggagatcttctctgccgctttttttttcatcaatcatccccataatccttgttagattatcaattttaaaaaactaacagttgtcagcctgtcccgcttataagatcatacgccgttatacgttgtttacgctttgaggaatccacgatgagtgaggcagaagcccgcccgactaactttatccgtcagatcatcgatgaagatctggccagtggtaagcacaccacagtacacacccgtttcccgccggagccgaatggctatctgcatattggccatgcgaaatctatctgcctgaacttcgggatcgcccaggactataaaggccagtgcaacctgcgtttcgacgacactaacccggtaaaagaagatatcgagtatgttgagagcatcaaaaacgacgtagagtggttaggttttcactggtctggtaacgtccgttactcctccgattattttgatcagctccacgcctatgcgatcgaactgatcaataaaggcctggcgtacgttgatgaactgacgccggaacagatccgcgaataccgcggcaccctgacgcaaccgggtaaaaacagcccgtaccgcgaccgcagcgttgaagagaacctggcgctgttcgaaaaaatgcgtgccggtggttttgaagaaggtaaagcctgcctgcgtgcgaaaatcgacatggctagtccgtttatcgtgatgcgcgatccggtgctgtaccgtattaaatttgctgaacaccaccagactggcaacaagtggtgcatctacccgatgtacgacttcacccactgcatcagcgatgccctggaaggtattacgcactctctgtgtacgcttgagttccaggacaaccgtcgtctgtacgactgggtactggacaacatcacgattcctgttcacccgcgccagtatgagttcagccgcctgaatctggaatacaccgtgatgtccaagcgtaagttgaacctgctggtgaccgacaagcacgttgaaggctgggatgacccgcgtatgccgaccatttccggtctgcgtcgtcgtggttacactgcggcttctattcgtgagttctgcaaacgcatcggcgtgaccaagcaggacaacaccattgagatggcgagcctggaatcctgcatccgtgaagatctcaacgaaaatgcgccgcgcgcaatggcggttatcgatccggtgaaactggttatcgaaaactatcagggcgaaggcgaaatggttaccatgccgaaccatccgaacaaaccggaaatgggcagccgtcaggtgccgtttagcggtgagatttggattgatcgcgccgatttccgcgaagaagctaacaagcagtacaaacgtctggtgctgggtaaagaagtgcgtctgcgtaatgcttatgtgattaaggcagaacgcgtcgagaaagatgccgaaggtaatatcaccaccatcttctgtacttatgacgccgataccttaagcaaagatccggcagatggtcgtaaagtcaaaggtgttattcactgggtgagcgcggcacatgcgctgccggttgaaatccgtttgtatgaccgtctgttcagcgtgcctaacccaggtgctgcggatgatttcctgagcgtgattaacccggaaagcctggtgatcaaacagggctttgctgaaccgagcctgaaagatgcggttgcgggtaaagcattccagtttgagcgtgaaggttacttctgcctcgatagccgccattctacggcggaaaaaccggtatttaaccgcaccgttgggctgcgtgatacctgggcgaaagtaggcgagtaattttaagtttcgctatgccggatggggcgtttacgtcgcatccggcaaggaacagacaaacagtttcaaacgctaaattgcctgatgcgctacgcttatcaggcctacatgatctctgcaatatattgagtttgcgtgcttttgtaggccggataaggcgttcacgccgcatccggcaagaaacagcaaacaatccaaaacgccgcgttcagcggcgttttttctgcttttcttcgcgaattaattccgcttcgcaatttatccataaaataaatttaaaataacaaaacataattaaataaaatgtaaccgctttcatcttgctggaatttcacgcttttattcttctgcaagcctttcaaccgcaaacttaagccttgtaacaaaaatcatcaaaatatgtgcggttgctcatgttcttacattctggttacagaaagagattgataattcgcgtcgcgaaaaatagtctgttcctgtagtcagcgagacttttctcaacgctacttttttaatttttattttttcgctgttcacctttggtgcagcaatttatacgtcaaagaggattaacccatgcgtacgtttagtggcaaacgtagtacgctggcgctggctatcgccggtgttacagcaatgagcggctttatggcaatgccggaggctcgcgccgaaggattcatcgacgatagtaccttaaccggcggtatctattactggcagcgtgaacgcgaccgtaaagatgttaccgacggcgacaaatacaaaaccaacctttctcactccacctggaatgccaacctcgattttcagtccggttatgctgctgatatgttcggccttgatattgctgcgtttacggcgattgaaatggcggaaaacggcgacagctcccacccgaacgaaatcgcgtttagtaaaagtaataaagcctatgacgaagactggtccggcgacaaaagcggtataagcctgtataaagctgcggccaaatttaaatacggtccggtttgggcgagggcaggttacattcagccaactggtcaaacgctgttagcgccgcactggagctttatgccaggtacttatcagggggcggaagccggggcgaattttgattacggcgatgctggtgcgttgagtttctcctacatgtggaccaacgaatacaaagcgccgtggcatctggaaatggatgagttttatcagaacgataaaaccaccaaagttgattatctgcactcctttggggcgaaatacgacttcaaaaataacttcgtactggaagcggcatttggtcaggcggaagggtatatcgatcaatattttgccaaagccagctacaaatttgatatcgccggtagcccgttaaccaccagctaccagttctacggtacccgagataaagttgacgatcgcagcgtcaacgacctttatgacggcaccgcctggctgcaagcgttgacctttggttaccgggcggctgacgtagtggatttgcgcctcgaaggcacctgggttaaggctgacggtcagcagggatacttcctgcaacgtatgactccaacctacgcttccagtaacggtcgcctggatatctggtgggataaccgttctgacttcaacgccaacggcgaaaaagcggtcttcttcggtgcgatgtatgacctgaaaaactggaatcttccaggcttcgccatcggcgcttcctacgtttacgcatgggatgctaaacctgcgacctggcagagcaatccggatgcgtactacgacaaaaaccggactattgaagagtctgcctacagcctggatgcggtctataccattcaggacggtcgcgccaaaggcacgatgttcaaactgcatttcaccgaatacgacaaccactccgacatcccaagctggggcggtggttacggcaacatcttccaggatgagcgtgacgtgaaatttatggtaatcgcaccattcaccatcttctgatgcccgacgcggcaggttttgtgcctgccgcacgtttgaggaatttgctatgaaaaaactgattctcatcgccataatggcaagcgggctggtagcttgtgcgcaaagtaccgcgccacaggaagacagtcgtctgaaagaggcatacagcgcctgtatcaacaccgcacaaggtagcccagaaaaaattgaagcctgccagagcgtgttaaacgtgctgaagaaagagaaacaacatcagcagtttgccgaccaggaaagtgtacgcgtactggattatcagcagtgtctgcgtgcaacgcaaaccggaaatgatcaggcggtgaaagccgattgtgataaagtctggcaggaaatacgcagtaataacaaataagtgagagctgtaactctcgcttttcttatttcccttgcataaaaaagccaacccgcaggttggcttttctcgttcaggctggcttatttgccttcgtgcgcatgttcatcttcgcggcaatcgccttcggcacagtgaccgtaaagatagagactgtggttagtcaggcgaatgccatgttttgcggcaatttcacgctgacgcgcttcgatggaatcatcactaaattcgataaccttgccgcagtcgaggcagatcaggtgatcgtggtgatgttgctgtgtcagttcaaatacggatttaccgccttcaaaattgtggcgggtgacgataccagcgtcgtcaaactggttcagtacgcgatataccgtagccagaccaatttcttcacccatatcgatcagacgtttgtataaatcttccgcactgacgtgatggttgtccggctcctgaagaacttccaggatttttaaacgaggaagcgttactttcaggccagctttctttagggcggtattgttatcagtcatgcggaatctgtcctgttactaagcggttcacttcattagaagaagtgacagaatttgctcttgagataatgcgtatcattatagaattgccacgcctaaatgaaaaccacaagtccctggcaaatattgttaataaaaacgtggcacagcttacatttacaacggcaaggccacttgaacaccgggacattgtacaggtacaacagcaaaagttacaaatttgtagcaattattttgattggcattatctattaatacggcgtagacatgagtctacgccgcatcacatcaggcattgagaatttcgtcgagatgcaactcttcagaaatctgtttaacccatttttctacacgttcagcggtcagttccggctgacggtcttcgtcgatagccagaccgacaaagtggtcgtcatctgccagacctttacttgcttcgaaatgatagcccgcagttggccagtgaccaacgatggttgcaccgcgcggttcaatgatgtcgcggatggtgcccaatgcgtcgcagaaatattcggcgtaatcttcctggtcaccacaaccaaacagcgcaaccagtttgccgttgaaatcaatctcttcgagagtcgggaagaagtcatcccagtcacactgcgcttcgccgtaataccaggttgggatgcccagcagcagaatgtcataagcttccagatcttctttgctgctttttgcaatgtcatggacatcggcaacgtctttaccaagctgtttttgaatcatttttgcgatattttcggtattaccggtgtcgctgccgaaaaagatgccagtgatagccatgagtgaaataacctcttgaaacttattgaaatgggggtggaaaattgcccacggataaaggcaatcatagcagaacaggcagtcttgcggaatcagcaaacgagcaggactgcacactgtgctacatgaaagtggaaatttaaacgatgccctgactacgcagcgccgccagttgctgcattaacatctcttcgatcagttcgctacggctcatattgcggctctccgccagctcgttcagcgcctcgacagcttccgcgttcagcttcagttcgacacgcttaaggccacgtactttgtcgcgttttagctggttgcgtttattaatacgcagctgttcatcgcggctaagcggattagttttcggtcgtcccggtcgacgctcgtgcgcgaacagatctaatgtcgtacggtccgtttgttctttggccatgatcttggtgacttcgggggaaacaatcagccaggcctctgcccggatggatagcgcgccataatacatcagcgcgatgagtcacgccaacgcccacgcgcggaaagcgacgcggacgctgggtttttaatcagttgcgttaatcattgagatagcgacggatagcgcgtaataccgcatccggtttttcagcatggacccagtgacccgcgcctgcaatcacatgcgcccgtgcctgtggaaattgagccagtaaatcatcacggtactgctcgctaacatacggagaattgccgccagggataaacagggcagggtgatcccatgccgggattttctcccaacctacaatatgcggatactgatcccacaataccggcacgttaaagcgccactccccgtcaacaaaagatttcagcagaaactgaatcaccccttcttcattaagatgctggcgcattattgctgctgcttgctggcgagtttgtgcgtcgctttcactgaccgcgttgatagccgcaaaaatctcatcatgacggcgtacgtgatagtcgaccggcgcgatatcgatcgccaccagtttatcgatgcgatcggaggctagtgcagtaagtgccattaccgctttaccgcccatggagtgaccgataaatgttgctttgtcgatctgctgtgcatccagagtatcaacaagatcctgcgccatcgccgggtaattcattaccggatctctcggactaagaccgtggttacgcatatcaacctggatgatattgtgatcgtttaccagatcgcgagccagtacgccaaggttgtcgaggctgccaaacagaccgtggacaagaacgatgggagaattattgtgctggttttgtgcagtttgcgcgcggatattcaatttcatggcaaagttctttttttcgcgttgtcgggttagggtattatgttgaccattgtgccacagggctgcaacaaataaggtttattccgagtttttctgcaagccaggcttgacgctatccgctgccgggatttattcatatactcctggcgacttgtattcagctaagacactgcactggattaagatgaaaacgattgaagttgatgatgaactctacagctatattgccagccacactaagcatatcggcgagagcgcatccgacattttacggcgtatgttgaaattttccgccgcaagtcagcctgctgctccggtgacgaaagaggttcgcgttgcgagtcctgctatcgtcgaagcgaagccggtcaaaacgattaaagacaaggttcgcgcaatgcgtgaacttctgcttagcgatgaatacgcagagcaaaagcgagcggtcaatcgctttatgctgctgttgtctacactatattctcttgacgcccaggcgtttgccgaagcaacggaaagcttgcacggtcgtacacgcgtttactttgcggcagatgaacaaacgctgctgaaaaatggtaatcagaccaagccgaaacatgtgccaggcacgccgtattgggtgatcaccaacaccaacaccggccgtaaatgcagcatgatcgaacacatcatgcagagcatgcaattcccggcggaattgattgagaaggtttgcggaactatctaaaacgttgcagacaaaggacaaagcaatggcaatccacaatcgtgcaggccaacctgcacaacagagtgatttgattaacgtcgcccaactgacggcgcaatattatgtactgaaaccagaagcagggaatgcggagcacgcggtgaaattcggtacttccggtcaccgtggcagtgcagcgcgccacagctttaacgagccgcacattctggcgatcgctcaggcaattgctgaagaacgtgcgaaaaacggcatcactggcccttgctatgtgggtaaagatactcacgccctgtccgaacctgcattcatttccgttctggaagtgctggcagcgaacggcgttgatgtcattgtgcaggaaaacaatggcttcaccccgacgcctgccgtttccaatgccatcctggttcacaataaaaaaggtggcccgctggcagacggtatcgtgattacaccgtcccataacccgccggaagatggtggaatcaaatacaatccgccaaatggtggcccggctgataccaacgtcactaaagtggtggaagacagggccaacgcactgctggccgatggcctgaaaggcgtgaagcgtatctccctcgacgaagcgatggcatccggtcatgtgaaagagcaggatctggtgcagccgttcgtggaaggtctggccgatatcgttgatatggccgcgattcagaaagcgggcctgacgctgggcgttgatccgctgggcggttccggtatcgaatactggaagcgtattggcgagtattacaacctcaacctgactatcgttaacgatcaggtcgatcaaaccttccgctttatgcaccttgataaagacggcgcgatccgtatggactgctcctccgagtgtgcgatggcgggcctgctggcactgcgtgataagttcgatctggcgtttgctaacgacccggattatgaccgtcacggtatcgtcactccggcaggtttgatgaatccgaaccactacctggcggtggcaatcaattacctgttccagcatcgtccgcagtggggcaaagatgttgccgtcggtaaaacgctggttagttctgcgatgatcgaccgtgtggtcaacgacttgggccgtaaactggtagaagtcccggtaggtttcaaatggtttgtcgatggtctgttcgacggcagcttcggctttggcggcgaagagagtgcaggggcttccttcctgcgtttcgacggcacgccgtggtccaccgacaaagacggcatcatcatgtgtctgctggcggcggaaatcaccgctgtcaccggtaagaacccgcaggaacactacaacgaactggcaaaacgctttggtgcgccgagctacaaccgtttgcaggcagctgcgacttccgcacaaaaagcggcgctgtctaagctgtctccggaaatggtgagcgccagcaccctggcaggtgacccgatcaccgcgcgcctgactgctgctccgggcaacggtgcttctattggcggtctgaaagtgatgactgacaacggctggttcgccgcgcgtccgagtggcacggaagacgcatataagatctactgcgaaagcttcctcggtgaagaacatcgcaagcagattgagaaagaagcggttgagattgttagcgaagttctgaaaaacgcgtaaacacatttaataaaaaaagggcggtcgcaagatcgcccttttttacgtatgacaaacacagaattgcctgatgcgctacgcttatcaggcctacgaggatggtgcaatatattgaatttaagcgattttgtaggccggataaggcgttcacgccgcatccggcaaaaacaacgaacactttgtcaacaaactgagtagctcaaggaaatcccaatgaagaccaacaggagtctggtcgtcatagtgagtctaattaccgccacattactgctgactgcatgcgcccaacctgaacaaagtagtttagctggcgactggttactgacccctaaagataaaaccagaggattaacgggtagcattgcggtaaatattgcacctttccggtgtaagacaaattgccgtggtgataacttacctgataatacccgccgctggcagttgagtggcgggaacgaaaaagaacttacttatcttcataatatgagtgcacaagaaaaggtcggtttaaatcccggttggcaatgctacaccagtttttttatgcgggtttgccagggcaagcccggcactcgaccgatagtcaatgaggattatgtcagcgaaagcggattttttggcagcatgatgcatgtcgggattattgagttacgacgctgccagagtgaaaattgccagcaagaattgaaagcgataaatacacattaaaatagtgagtccgggaatgaaacccggacctgaacatgtcttattgcgtgaatgtttctttcatttgatactgcatttcccagagttcagtaaggctaataacttttcttgttcttgcttcttcactttgtacccataagaaagggtagaacgtgaaggcttccgttgcgcttaattttattacgtcttctcgccattgctgccatcgtacattttcatagaaggtatctaaatcaccggataatgcccactgaagaaactcagaatatccaacttccagactttcccaattcagcgtatctggcgcaaaataataaacgcagccagtatcttccccaagatcgccaccattaagagcaaaaattacccctgcgacatcgtcagcgatgggtaaagcccgcacgcctgcgaattcagggcgttgtgtccaacttactggatctcgtggcaaccgggggtgaccagatcctgctatgcgtaattaaccattatcaatcagcagacctccggagccatagacaagcgcacccatcggactttttgttgtcacctgtaattgataaagtgcggtttcggctaaatctttattaaccggtaagagttcggtatggtttgtggcgtcttttaaccagttctggattattggccaggcactatcttcagtatttactaactgattcatttcacgcatcgctacttgctccttgtgtgctacggtgtcatttatgatgaggaattgtatggaacattttttaaatattaagttccttatatttgaataaaaaatgactttatccatacattgccacttttttcaaagcataaaccgatacccaataccggtttcagtaataaaatggcgaggccgggccggatcctgttccagtttttgtcgcagatgccccatataattacgcaaatagttgctgtgttcgatcgcgtttagaccctacatctgccggatgcggcataaataacgaactatttgccaacaaacagaaagggcgatcattcaatcgcccttttttactttgttttattaaccgtgtttatttttcagttcaaagcgtggacttaccagaccatacagtgtccaaccaaggaaggtcacgatggaaccgtacagcatggcttcttccccggaactgtacagcgcataaaagctatacatcgcgccaacaaaagcaacaaagtttgcaactttcgctttactggggggcacattagcgaccttctgaataatgactaatgccgccatactcagaatatacggaatgatattggtcaccacggccaggttaaccagcacgttgaactgactgtttaggctcgggctaatggtcatcagtgccaatccactctgaataatcacaatggtcaacattccctgcaccggtgcatccactttggttacacgggagaaaattttagggaagtagccttcatcagaactagatttaaacacctgggcaatggtgaactgccagccaagtaggctaccgcagcaggacatcaccatcagcgccataatgactttacccacttccggcgtgaacatctgcgcgaaggccagaccaaatggtgccgtactatttgccagctccatatttggcacaatcccggcaatcacgttggtggagacgatataaatcaccgccgcacctaacgtaccgccgagtaccgcgattggcacattacgttccgggttttccactacatcagtattcgcacacgcagactccagaccaagaaaagcccacagcgtcatagcgatggaagaacctaccgcactgaagaacggtgcatgatgcggattccaggaatcaacgtacagcgtcgggctaaaccagaaccagccaataatgcacagaccgacgaccggaataatgaccccccacacggtaatgctactgatttgcccggtaatgcgcgcaccaccaaagttagccacggtacaaatccacagcaccccgatggtcgcaagaccaatctgcactgggctcaaactcgcgccgagcagttcggtgccgtaaccaaccgcgctaatagcaatcgcgacgttagcaatcagcagactgacgccgtaggtatagttcgccataaagttaccggatttaccgaaagcatactcggcataaccgcccataccgccacttttacggctgaacataccgcattttgcgaatgcccatgccagtgccatactgcctacggctgtcaccagccaggagataatactgattgtcccgacttcggcaagctttgtcggcagcatgatgataccggagcccatcatgttgaccatcgtcagtatggttaactgaacgacgcccattttgttgcttttagcctgactcataatttttcccctttcaacagggtgctttgcgcatcacgaggcttgatgacatagcaccaaacttgcttacgaccatcatgttcttcgatatagacaccctgcagctccggtgcaaaacctggcagcaggttgatcccttcttccagagcgctgaagtaacgcagaacagcaccaccccagatttcacccggaacaacacacagcacacccggaggataaggaagcgcaccttcggcagcgatacggccttctgcatccggcagacgaaccagttccacttcaccgcgtaaataggcgtagttggcttcttgcggattcatgctgacgcgtgggaagtgctccttacggaacatctctttttgcagttgtttcacgttgtggcgggcatacaaatcatgcatttcctgacacaactgacgcagggtataaccggcgtagcgctcttcatgctgtttgtagatggaaggtagcacttctgctaatggcgcgtcggactcaagcagtttttcgaagcgtaccagcagggcaacaagttgctgaagtttggccatatcttctgccggagtcagcaggaagaggatggagttaagatcgcatttttccggcactacgccattttcgcgcaggaagttagcaagaatcgtcgcgggtacaccgaacgcttcatattcgccgttacgtgcatcaatacctggggttgtcagcaacagtttgcatggatcgacaaagtattgattctctgcatagccttcaaaagaatgccagtgttcccctggtacaaactggaagaagcgcagatcaaccgcaatttgcgctgtttcatagctctgccagggtttaccatccaccagttcaggtacgaacggacgaatatgctgacagttatcgaggatcagtttgcgggcattaatgccatttaccacacaatccatccacatattacgaccgctgacaccttcatgcattttggcgttgatattcagtgcggcaaacagcggatagaacgggctggtggaggcgtgcatcataaaggcgttgttcatgcgtttgtgcggtacataacgctgttgccctttgatgtggctgtcttttttatgaatttgactagtctgagaaaaaccagcctgttgtttatgcacagattgcgtaaccagaatacccggatcgttctcattaagatccagcaacagcgggctacagtccgccatcatcggaataaactgttcatagccgacccatgcactgtcaaacaggatgtagtcacacagatgaccaattttatccaccacttggcgggcgttataaatcgtaccgtcgtaggtgcctaactgaatcacagcgaggcggaaaggacgagcctcttttgcccgctgcggtgcgacttccgcgatcagctcacgcaggtaactttcttcaaaacagtgcgcatcaatgccaccgataaagccatacgggttacgtgccgtttccagataaaccggtgttgcaccagcctgtagcaacgctccgtggtggttagatttgtggttattgcgatcaaacagcaccagatcacccggtgttagcagggcgtttaaaaccactttgttagaagaactagtgccatttaaaacgaagtaggttttatcggcattaaacacttttgccgcatgttgctgtgcaatgcatggcgcgccttcgtgaatcagcagatcgcccatcgctacgtcggcgttgcacaagtcggcacggaacagcgcctcaccaaagtattccacaaactgattccccgccggatggcgacggaaaaattcgccgccctgatgaccagggcaatcaaacgcgctgttaccttgattgacataatcgaccagtgcgcggaagaaaggtgggcgcagttgagtttcataatggctggcagcggtttctaactggcgaccataaaattctcgtcggctttcgcaattctcaaagacaccgctaatacggggcaaatactctgcgggtacacgttcttgattttcagtagcaataaataccgggatgccataacccgtggcatcgatttcatcgagttttccgcatgtaacatcgttgaggcttaaaactattgccgccacatcgatattacgactttcattaatgtagatacattctcgctgcgtggtaaaacagtccgggcaagaatcactaaccgcaatttttaatttactcatttttcatctctttattttaggtaatagcaggtcctcaatttctcgaatgagaaatcgatcgtgccggaaaaaagcaaagttaccccgctgataaataaatcaggtagattgcttttttcagaatgcagaaacccttaccagtcaggtggctgataatacaagggttaacagagaatgagcactgcggaatacaggcatatgcctgtaatacagagagtcaggaagacctgtacgctgaagtgcccttagtcggtagactaacgggcattgaagaagtgaaagtcgaagctattgcgatgagcaaacttcataatatgagttgtccgccttatatggggcatagtgcggctgttattttccatttaatttacctttcctgatgtgaatgaaggtgaagatattctatccaggaaatacggttgaactgtgaaggtgatcaataaaaaatgatcaatcttaatttatttaatgatgagctttttactcagtaatataaaatattgaattgttatttttgtgtgttgtttaagataaaaagccgtatttattattacggctttaattaataaaaggcaggctgtattaaaattaatattcaaagcataaaccgatagccaataccggtttcagtaatgaaatggcgtgggcgggcgggatcctgttccagtttttgtcgcagatgtcccatataaatacgcaaatagtgactgtgttcgaccgcgtttggcccccacacctggttaaggagctggcgctgggtgagtacttttccggcattgttgagcagcaccgccagcaggcggaactcaattggtgtgagatgcacctcttcctcaccccggtgaatcacgcgggcggctaaatcgacggtaacatcggaaaattttaccagcggatcgggcgcggtggtggcagagtggcggcgtaatgcgacgcgcagacgggcctgcaattcgccaatgccaaacggcttactcagataatcatccgctccggcatccagcgcggcgattttgtcgctctcttcgctgcgtgcggaaagcacaatcaccggcaccgcgctccactggcgcaggtcgcggataaactcaatcccatcaccatcgggcaggccgagatcgagaataatcaaatctggcttacgggttgccgcttccagcaagccgcgttgcagcgtttcggcctcaaagacgcgcatcccgtcgccctccagcgccgtgcgcagaaagcgacgaatagcctgttcatcttcaacaatcagaacgtttgtcacatatcctcatgaaattcttcaagttcaggggcagtttgctggggaagtgtaacacgaaaacaggcaccaccttccggtcggttgaacgcggtaatagtgcccccgtgtacatccactatcgcccgacaaattgccagtccaagccctacccccggtactgcgctctctttattcccgcgagcaaacttatcaaatatcgtctgctcctggcctggcggaagaccggggccgttatcccagacatccagttgtagattttcgccctcaacgtgggcatcgataccaatttcggcctgcgcacccgcatatttcaccgcgttctccagcagattaatcagcacccgttcaaagagtggcccgtcaacgtggattaaggtcagcggttctggcagagaaagattgatggggctgcttaaacccggttccagcatttgcagcgcgctgccgactacttcttccagcgttaaccactctttcttcaaattaaagccgccggactgaattcgcgccatatccagtagattattcaccagtcgggtagtgttcagcacatgctgacggatctcgctggcctggcgggcgtggggacttccttcgcttgccagatcgagcgttaagatttctgcctgaccaaacagcaccgtaagcggcgtgcgtaaatcatggctaagcgccgccagcagggcgttgcggatctgttcacgttcgcttgccatccgcgcctgttcttcgctggcggttagcgtcagccgctcaagggcattggcgactaacagcgtaaacgtctccagcaggcgctgctgttccgggatcatcaactggcgcagattccccggctccaccaccaccagcccgtaggttttctcgccgctttttagcggcaaaatctggtacggtacaccgggtaacgtgtcggtgcccgcgcccgcaggcaggcctttatcaaaactccactgcgcgatggcatcgtcccacggcgtcattccttgcggatgtgttaacggctgcaatttaccgttgtcatcgggcaacaacacctgactgcgggcatgaaacgtggaggcaataaattgttcgctggtggcagcgatatcctgcggactgcggcccaccgccagagctttgctcatttcatataagtgccgtgtgcgttgctcgcggtaacgggctacccgcgcctgataacgcacgccagcagtaaggttcccgatcaccagcccgacggttaacatcaccgcgaaggtcagcagatattgcacatcagagacggcgagcgtgccgcgtggggcgataaaaaagagatcgaaactcactacattaatgacggtggcaaccacactaggccagcgtccataaaatagcgccaccaccaccacgccaagcagatacagcatcaccaggttggcggcatcaaacgccatcagccactgcatggcaattaaggtgataacggcgcataacgcggcggcaaccacgcatccctgaatttgtacacgccacttgtctttaaaagagcggttatccggcgcgttgttaatcgtgcgggcgggtggttcatcaagcgcgaccagcacctgatcgagatcgggggcgatgcgcgccagtcggtcagcaaacgtttcccgacgccaccagcggcggctggccgggcgaccgagaataatcttgccgagattatgttcacgggcataacgcactaccgctttctcttccgctggatcagaaagtgttgccgtctccgcgcccagttcctgcgccagacgtaaggcgctgagaattgcccgacgttttttttccggtaagcggtgcagggcaggggtttcaacatacaccgcgtgccagacgctacccagccgactcgccagccgcgccgctgcgcggaccagtttttcgctgccggtgttatggccgatgcataaaaggatcgcgtcgcgcgtgcgccacactttctcttcgccaggatgcccccgccaggcgcgcatttgctcatcaacgcgatcggcagtacggcgcagtgccagttcgcgcagggcgatcagattacctttgcggaaaaaatgttcaatggcgcgctccgcctgcccggcaatatagactttgccttctttcagccgctggcgcagatcgtccgggggcaagtccaccagcaccacgtcgtcggcggcatcgaaaaaaggatcgggcacggtttcccgtacctgaattccggtgacgccgctgaccacatcattcagactttccagatgctgaacgttgacggtagtgaaaacatcaatgccagcttccagcagttcttcgatatcctgccagcgtttgggatgacgggaacctggcgcattactgtgcgccagttcgtccattaagatcagcgccgggcggcgggcgagggcggcatcgagatcaaactcgctgatatgccgcccacggtacgcctggcgttttaacggcagaacagccagcccttccagcatggcggcggtatcttttcgcccgtgggtttctaccacgccaaccacaatatccagcccttgcgcccgcagtcgctgggcttctgccagcatcgcccaggtcttcccgacgcctgcacaggcaccgaagaaaactttcagcttcccccgatgcggcgcggcagtttgttccagcagacgatcggggtcgggacgtaagggttcgttattcatcaagtttatccagcgccagattgagttcaacaatgttgacaaccggctggccgatatatttcaccagcggttgttggctgtattttgcgatcagttgcgtgagctgttcaacgctgagattacgcgctttcgccacgcgtgggatttgccaggccgccgcttgcggggtgatattattgtccagcccgcttgcgcttgccgtcaccagttcaaccggaacgctcgcgctggcatccgggttagcggcccgtaatgcagcaacgcgtgcggctattagtttatccagctcagggttactgaccgccagattgctcccgccagaagcctgtggattatagggcatttctgccgttgcgctcgggcgaccatgaaaatagccgttgccggtaaaattctgcccgattaatgcgctaccgcgcaccgtatcaccttcacgaatcaagctaccattggcctgccagggaaaccaccattgccccagtacggtggtcagcagcgggtaaacgccgccagtaatcaataacagaaagataaatgtacttaatgccggacgtaatccactcatggtaaacctcacaccagaccgcaaacggtcagcagtaaatcaatgactttgataccgataaacggcaccagcagcccacccagaccgtaaatccataagttacggcgcaacatggcagaagcggtaagcggtttataactcacgccttttaacgccaggggaatcaaaaagacgataatcaaggcgttgaaaatcaccgcactgaggattgcggagtcggggctatgcaggcacatgatgttcagcgcatttaactgcggatacgttgccgcgaatgccgccggaataatggcgaagtatttcgccacatcgttggcaatgctgaaggtggtcaggctgccacgggtcatcagcatctgtttgccaatgtgcaccacctcgatcaacttggtcgggttagagtcgagatcgaccatattgcccgcctctttcgccgcctgggtgccggagttcatcgccaccgcgacatctgcctgcgccagcgccggagcatcgttggtgccgtcgccggtcatcgctaccaaacgaccttccgcctgatactgacggatcaatgccagcttggcctccggtgtcgcttcggcgagaaaatcatcgacacccgcttccgcagcaatcgcggcggcagtcagacggttatcgccggtaatcatcaccgttttaatgcccattttgcgcagctgggcgaagcgctctttaataccgcctttgacgatatctttcagcgcaataacgcccagcacacgagaaccttccaccaccaccagcggcgtggctccctgacgcgcaacctgatcgactttttgatcaacatcggtagggaagtgaccaccgttagcctcaacatggcgacgaatggcatcgacagaacctttacggatcatgcggttgtcgatgttgatcccgctcatccggctttgcgcagtaaacggtacaaaggtggcatggaggctctgcacatcgcgctcgcgcaggttaaaacgctgcttggcgaggatcacaatactgcggccttccggcgtttcatcagccaggctagccagttgtgcggcgtcagccagcgttttttcatccacgccctgcgcggggataaactcgctcgcctgacggttaccgagtgtgatggtgccggttttatccagtagcagaacgtcaacgtcacctgccgcttcaactgcacgtccgctggtggcaatcacattcgcgcctagcatccggctcatcccggcgacgccgatcgcactcaacaggccgccaatagtggttgggatcagacagaccagcagcgccaccagtaccgttacgctgactgcattaccgccccacgcggaaaacggccacagcgtggcggttgccagtaaaaagacgatagtcagggcaatcagcagaatggtcagggcaatttcgttcggcgttttgcgtcgctgtgcgccttccaccatcgcgatcatccgatccagaaatgtctcgccggggttaacgctacactcaatcaccagccagtcagaaagaatacgcgtgccgccggtgacggaggcaaaatcgccgccggattcacggatcaccggtgcgctttccccggtgatggcgctttcatcgacgcttgcacccccttcaataacttcaccatcgcaggggataatatcgccagcttctaccagtacgatatcgcctttacgaagttggtcggcaggaactttgtccgccgcagcgccatatttcggctcacgcagcttgcgggcaaaggcagtttttttcacccctttcagactgttggcctgcgctttactgcggccttctgccagcgcctcggcgaaattagcgaacagtacggtgatccacagccaaccgctaatggccgcgctaaacagcgcattgccgggcatcgcaccgcttgccatcgcgatgctaatacaggtggtcagcagactgccgatccagacgataaacatcaccggattgcgccattgcgcctgcgggtttaattttttcaccgcttctttcagcgcctgaacgacaagtgttggttcgaatagcgccagttgtttacgactcatattcagtgctcactcaatatcatcaggagagatattccgccaccggaccaagcgccagggcagggataaaggtcagtgcgccaaccagcaacacggtgccgattaacaggccaacaaacagcgggccgtgcgttggcagcgtgccggagctggcggcttggctctttttactcaccaggctaccggcaattgccatcaccgggataatcaccccgaagcgaccgacaaacatgcagaacgccagtaaacagttccagaacggagagttggcgcttaatccggcaaaggcgctgccgttgttgttagcggcggaactcacggcgtacagcacttcgctaaaaccatgcgggccagggttgagcatggcgctacgtccggcgtcggtcatcatcgccaacgccgcgcccatcagcaccagcgtcggggtaaccagaattgccagtgcagtcagtttcatctcgcgtacgtcgatttttttacccagatattccggtgtacgaccaatcatcagcccggcaataaacaccgccagcaggacaaacagcatcatgccgtaaagaccagaaccgacaccgccgaacaccacttcaccaatttgcatcagccacatcggcaccatgccaccgagagcggtaaagctatcatgcatcgcaatcaccgcgccacaggaagccgccgtcgtcacgaccgcaaacaggctactgaccagcacgccgaaacggctctctttaccttccatattgatgctgctgtccgtgcccagtgccagcagatgaggattaccctgaacttctgcccacatcaccacgcctacgcagatgacaaaaatcacactcatcgcccacagcaacatgcgcccctggcggcgatcgcccatcacttcaccaaaggcaaagcacagcgccgttgggatcaagaagatcgccagcatctgcacgaagttggtcagtgcggttgggttttcaaacggatggctgctgttggcattaaagaagccaccgccgttagtaccgagcatcttgatcgcttcctgagaagctacaggccccatgggtaacagctgttgcgctccttcaacggtattcacagcctgataaggcagaaagttttgcagcgcaccttgttgaataaaaaacagtgcaatcaacaacgccacagggactagcacccataacgtgatgcgtagcagatcgacccaggcattcccgagcgtgctcatgctctggcgggtaaacgcacggatgagggcaaaaatcaccgcaatcccgctggcggcagaaagaaagttttgcaccgttaagcccgccatctggctgaaatagctcaacgtggtttcaccgctataagattgccagttggtattggtgacaaagctgacggcggtattcagcgccagatcccagctcagccctggcaactgctgtggattaagcggcagatagtgctgaccgagcaacataaaaaacagcaccgccagccccagcatgttcaggccgagaatggcacaaagatattgcttccagttcatctcacggtcagagacgccaagtgcgcgaaaaagtacgcgctcaacgcccgttgtaccgggaagaggaatgtcattaatcagccgcgccagcccgctgcctaaaggacgcgccagcaccattaacaccagtaaaaacgtggcgatcagtaagaacccttgcgcagccatcagaacgcctccgcattgatcagggcataaaccagataacccagtaataaaaacaccagcaatacgccggttatcacgcctgcactcacagtgcacctccagtggcctaaaagtgataccggaagggtagaattctggctgcaaagatttcgcaaaaatctgcgggcggggtgtaaaaaaagtataaaaatggcaaaagccatgatttaactaatgtttagtattaatttaacttttgtgtaacttaattacaggatgaatgtaaataaaccatcaataagcaaaaataagtggtcggatgagtagtaaaattacacaaaaggcggtactattttcatcagataaacaaattcatttttccggtgccattcaccgggtagatacaaaagggggagaaaagtatggaactctacagagaatatcctgcatggcttatctttttacgccgtacttatgcggttgcagcgggcgttctggcgctgcctttcatgcttttctggaaagaccgcgcccgcttttacagctacctgcatcgcgtctggagcaaaaccagcgataaaccggtgtggatggatcaggccgaaaaggcaactggtgatttttattgattgctgagttttgaatacattgaacgtctacacttactcctgtaaaccgctcaggagcagtaatgaatctacaacgatttgatgacagcaccctaatccgtatctttgcccttcatgagttacatcgactgaaagaacatggcttaacgcgcggggcgcttctcgattatcacagccgctataaactcgtctttctggcgcattctcagccggagtaccgcaaacttggcccgttcgtggctgatattcaccagtggcaaaatctggatgactattacaaccagtaccgccaacgcgtagttgttttgctttctcaccccgccaacccgcgcgatcacaccaatgttttgatgcacgttcagggttattttcgcccgcatattgattccacagaacgccagcagctggctgcgcttatcgacagttatcgccgtggcgagcaaccacttcttgcgccgctgatgcgtatcaaacactatatggcgctttatcctgacgcctggcttagtgggcagcgttatttcgaactttggccgcgtgtgattaacttgcgccatagtggagttttatgactacccatctggtctggtttcgccaggatttacgtctgcacgataatctcgcactggctgccgcctgccgcaatagctctgcacgcgtgctggcgttgtatatcgctacaccacgccagtgggcgacgcataacatgagcccgcgtcaggctgaacttatcaatgctcaactgaatgggctacaaatagcgcttgcggaaaaaggtattcctttattgttccgtgaagtggatgactttgtcgccagtgtcgaaatagttaaacaggtgtgcgcggaaaacagcgttacccacctgttttataactatcagtatgaagtgaatgagcgggcgcgggatgtggaagttgaaagagcgctgcgtaacgtggtgtgtgaaggatttgatgacagcgtgatcctgccgcctggcgcggtgatgaccggtaatcacgagatgtacaaagtctttacgccttttaagaatgcctggctgaaacggctgcgggaagggatgccggagtgcgtcgctgcgccaaaagttcgtagtagcggaagcatagagcccagcccatccattacgctgaattatcctcgtcagtctttcgatactgcgcattttccggtggaagaaaaagcggcgattgcgcaattacgccagttttgccagaacggtgccggagaatatgagcaacaacgagattttccggcagtggaaggcaccagccgtttgagcgccagcctggcaacgggcgggttaagccctcgccagtgcttgcatcgcttgttggctgaacagccgcaggcgctggacggtggggccggtagtgtctggcttaatgagctgatctggcgcgagttttaccgtcacctgataacgtatcaccccagcttgtgtaaacatcgtccatttattgcctggacggatcgtgtacagtggcagagcaatcccgcacatttacaggcctggcaggaaggcaaaacgggatacccgattgttgatgccgctatgcgtcagcttaacagcactggctggatgcataacaggctacggatgattacagccagttttctggtgaaagatttattgatcgactggcgcgaaggcgagcgatatttcatgagccagctgattgatggtgatttggcagccaataacggtggctggcagtgggccgctagtaccggaaccgatgcagcgccgtattttcgtattttcaacccgacaacccagggcgagaaatttgatcatgagggcgagtttatccgccagtggctaccggaactgcgcgatgtgccagggaaagtggtgcatgagccgtggaagtgggcgcagaaagcaggtgtgacgctggattatccgcaaccgatagtcgagcacaaagaagcgagagtacaaacgttggcagcgtatgaggcggcgcggaaggggaaataacagacgcgtcaggcaatcgagcccagatgccggatgcggcgtgaacgccttatccagcctacaaatttgtgcaaattcaataaattgcaggaaatacgtaggcctgataagacgcgtcaagcgtcgcatcaggcatcggtgctggcctattaagactccagcgccagcgcgcggtttctgaatttcagcgcctgatacagccaaatcatcagtaccagtcctacacacgccagtgcgccccaggtaatttgatcaaatacttcaatatatgcattgatggagtagttgatcgccccggaagcatcaaagctagcctggcttgtctgatcggcaatcacgcccgccagatagttcgcgatcgcgccagaaagcagcatgtagatgccggttaatacgccggtcacaccggggatttcaatgcgcgtaatttggctcatggcaaccgggtcgataaacagttccgcaaagcccatcaccgccaggcctaataccatcagtggcagagaagagtgaccatacattgcggaccagcgggcgcttaaggtcagaatgcagaatccggcgctcatcaggccaaggccaagagcaaatttcccccagatgcgcacggtacgattacccgcgacactctcttttaccacccacgccaggaacacaccgcacagcataactgcgaaggcattaatgctctggaacatcgcggtcggaacggtataaccaaacatatcgcggttaacgaagcggtcgatataaaggctaatgctgctaccgccctgttgtgcgaaggcccagaacaacatactgaagaaggtgagcgtcacaatcagccccagctccttccgctgtttctggttttctgctttgcgataaatttttgccagtacacccaggccaataatagtcgcgacaattaaggcgtatacgctccactctttccagaacagtatggtaatcagtgcaggcgttgccaccagcagaaccagcagccatccccagttcggcaggagaaagtttgtcgcacgcagtacttttttgttaacgccgcgggtatgagtgaaatgacgattgccacataagaaaatgaccagacccgcgatcatgccaaccgccgccaggccaaagcccatcgcccagctgtactcttcctgggcgtaaccacaggcgataggtgcgataatagaccccacgttacccgccgcatacatcaggctgaaaccgccatcacgacgcggatcggttggctcatacagctcgccgagcagacagcttacgttagatttaaacaggccatagccgcagacgataatcgccagggacagatagaggaaactcggatggatctcactggcacccagcaccacatgaccgatcgccatcaacaacgcccccagcatcaccgccatgcgattgccgagaactttatccgccaaaaagccaccgaggattggcgtgacatacaccaggctacagtaggcgctaaataactcgtaggcgtgagtatcgttgtattttagttgattggtgagatagagaatcagcagggcacgcatgccgtaaaagctaaaatattcccagatttgcagcgcaacgacatagtaaatagcgcgcggctgacttgcgtgtttattcataataattccacaattgacggcaacgtcacgtaatagttgcgcggcgtgcttgtgtttccttaaagttaaaactttgatacagatctgattatttatgcaatatgctgtctgattgcataaatatacattagctgaagcgtgatgatataaacaatttgcgtcttttggcgtcgggtttgtttcttaatatgtcaaaagattggctatcgacgaactggcgaggtaacgctatgttaacggtgtagctatcagaatacggaaggcgcgaagatgaaaaacaccgaactggaacaactgattaacgaaaaactgaacagcgcggcgattagtgattacgcgccgaatggtttgcaggtggaaggcaaagagacggtgcaaaaaattgttaccggtgtcaccgccagccaggctttgctcgatgaggcagtgcgtctgggcgcggatgcggtcattgtgcatcatggctacttctggaaaggagagtctccggtcattcgcggaatgaagcgtaaccgtttaaaaacgttgctggcgaatgatatcaacctgtatggctggcatttgccgcttgacgcacatcctgagctgggcaataacgcacagctggcggcgttactggggatcacggtcatgggcgaaattgagccgttggtgccgtggggcgaactgaccatgcctgtgccgggactggagctggcttcctggattgaagcgcgtctgggacgtaagccgttatggtgtggcgataccggacctgaggtggtccagcgcgtcgcctggtgcacgggcggcgggcaaagttttatcgatagcgccgcgcgttttggcgtggatgcttttattactggcgaagtttctgaacagaccattcatagtgcccgcgagcagggattgcatttttatgctgcaggtcaccatgccactgaacgtggtggtattcgcgcattgagcgagtggctgaatgaaaataccgatcttgatgtgacctttattgatattcctaatcctgcataacgaataatcagagggatcgaaagtgcaacgagcgcgttgttatctgataggtgaaacggcggtagtgctggaactggaaccgccggtgacgctggctagccagaaacggatctggcgactggcgcagcgtctggtggatatgccgaatgtggttgaagccattcccggcatgaacaatatcacggtgattttgcgtaatcctgagagcctggcgctggatgccatagagcgtttgcaacgctggtgggaggagagcgaggcgctggagccggagtctcgctttattgaaattccggtggtttacggtggtgcaggcggaccggatttggcggtggtcgcggcgcattgcgggttgagcgaaaaacaggttgttgaattgcactcctccgtggaatacgtggtctggtttttaggttttcaaccgggcttcccgtatctcgggagtttgccggaacaactacacacgccacggcgcgctgaaccgcgcttactcgttccggcaggttctgtcgggatcggcgggccgcagactggtgtttatccgctggcaacgccgggtggctggcagttgattggtcataccagtctcagcctgtttgatccggcgcgtgacgaacccatcttattacgtccgggagacagcgtgcgctttgtaccgcagaaggagggagtatgctgaagattattcgtgcgggcatgtataccactgtgcaggatggcggtcgtcacggttttcgccagagcggtatcagccactgcggcgcactggatatgcccgcgttacgcattgctaacctactggtgggtaatgacgccaatgcccccgcgctggagatcacgctcggtcagttaactgttgagttcgaaactgatgggtggtttgctctgacgggtgccggttgcgaagcgcggctggatgataatgccgtctggaccggctggcgattgccgatgaaagcaggccagcgtttaacgcttaaacgcccgcagcacgggatgcgcagttatctggcggtcgcgggtggtattgatgttccgccggtaatgggcagttgcagcaccgatctcaaagtggggattggcgggctggaaggccgtttactgaaggatggtgaccgactcccgattggcaaaagcaagcgtgattctatggaagcgcagggcgttaaacagctgctgtggggcaaccgcattcgcgccttgccggggccggaatatcatgagttcgatcgcgccagccaggatgcattctggcgtagcccctggcagcttagcagccaaagtaaccgcatgggctatcgcttacaggggcaaattttaaaacgcaccaccgatcgcgaactgttatctcacggtttgttaccgggcgtggtgcaggtgccacataacgggcagccgattgtgttgatgaacgacgcacagaccaccggtggttacccgcgtattgcctgtatcattgaggctgatatgtaccatctggcgcaaattccgctcggtcagccgattcattttgtccagtgtagtctggaagaggcactaaaagcacggcaagatcagcaacgttattttgaacaattagcgtggcggctgcacaatgaaaattgacctgaacgccgatctgggcgaaggctgcgccagcgacgcagagctattaacgctggtttcctctgccaatattgcctgtggatttcatgcaggcgatgcgcaaatcatgcaggcttgcgtgcgtgaagcaataaaaaatggtgtcgcgattggcgctcacccgagttttcccgacagggaaaattttggtcgcagcgccatgcagctgccgccagaaaccgtttacgcccagacgctgtatcaaattggcgcgctggcaacgattgcccgtgcgcaaggcggcgtaatgcgtcatgtcaaaccgcacggcatgttgtacaaccaggcggcgaaagaagcacaactggcagacgccatcgccagagcggtatacgcttgcgatccagcattgattctcgtcgggctggcgggaagcgagctgattcgtgcaggcaagcaatatggtctgacaacgcgcgaggaagtgtttgccgatcgcggttatcaggctgacggcagcctggtgccgcgaagccagagtggcgcgttgattgaaaacgaagaacaggcgctggcgcaaacgctggagatggtgcaacacggcagagtcaaaagtatcaccggcgaatgggcaacggtcgcggcgcaaacggtctgcctgcatggcgacggcgagcacgcactggcgttcgcccgccgactacgctctgcatttgccgaaaaggggattgttgtcgcagcataaccccgattaataaagaatgaaaaaaggatatcaccatgcctgaaggcccggagatccgccgtgcagcggataacctggaggcggcgatcaaaggcaaaccactaactgatgtctggtttgccttcccgcagttaaaaccttatcaaagtcaacttatcggtcaacacgttacccatgtggaaacgcgtggtaaggcgttgttaactcatttttccaacgacttaacgctctacagccataatcagctttacggcgtctggcgcgtggttgataccggcgaagagccgcagaccacgcgagtattgcgggtaaaactgcaaacggctgacaaaaccattctgctttatagcgccagcgatattgagatgttgaccccggaacaactgaccacgcatccgtttttacaacgcgttggtcccgatgtgctggatccgaatctgacgccggaggtggtgaaagaacgattattgagcccgcgctttcgtaaccgtcagtttgctggattactgctcgatcaggcgtttctggctgggcttggcaattatttgcgggtggagatcctctggcaggttgggttgactggaaatcataaagcgaaagatctcaatgcggcgcaactggatgcactcgcacacgcgttactggagattcctcgattttcctacgctacgcgggggcaggtggatgagaataagcatcatggggcgctgtttcgctttaaggtttttcatcgagatggcgaaccgtgcgaacgttgtggcagcatcattgagaaaaccacgctgagttctcgcccgttttactggtgccctggctgccagcattaagcgctccgcttcggcgcataggtactaataaaccgcgcaatggcaggccctgtcagcaaaatactgaacaggcgtagggtttgcatcgccataatgagcgccatatcggcattgctccctgcggcgatgaccgccacggtatcaagcccgccggggctggtggcgaggtaggcagtcataaaatcaatgtgcataaaccgggtcagcccccacgccatacccgcacaaatagccagcagagcaaaaatgctcagcaggatttgcggtagcgggcgtagtgcccgcagtaagatttgtttatcgaaaccaagaccaatccgccagccaattgccatatacgccatcgccagcagccattccggtagttcgatggtgatgagctgaccagactggagcactgcgcccgccagcatcgggatgagcatcgtgccggaaggaagacgcagcaggcatcccactgtaccggcaacgaccgcgagcaaaatagtaagcaggagattaatgctcactggcgggaaccagacgatatgctggttaaccgcttcagcgttatcgcccagcatcatgcgggtgaccagaacagcggcccccgcgacgaacagcactcgcagatattgcataaacgccaccaggcgaatatctgcgccgtaatcttgcgccatagcgaccattgccgccgcgccgccaggagaggagccccaggcaccggtatttccaggcaaactgctatagcgcaccaataaccaacccacaatggcgctggaaagcagcgttaccagtaaaattgcaagcacgatcggccagttgacggccagggtggtgagaatgctaccagtgaggttttgcgcaatcatgcagccaagaatggcctgggcggcgagaaaagcagagcggggaagttgcagagtaattccgcgcatactaaagatgatcccggcgatcatcggcccaagtaatagcgccgccgggagatgtaccgcgaggaaaccaatagaaaggagaagacttagcacacataacattccccactgcaaaactggcatccttcgctccctcattattttctctttggtgtatcgatacagcataaagaaagctgggccaggaaaaaataacagcaatcaaggaaaaggggaaaatcagcaattttctgaaagagatgccctttccggcggcaaagggcatcatggtaaatcagttatagttaatcttaaaaagcaccactgtatcgaaggggccagcctcgatgggggtgcctggaatggagctaagttcagccgtataggttttttcgtagaccaacatgtcactggtgaaatcggcgtattcagcatatttattgaaggtataagggctggcgttttcatccagtaaacgtagcttcagaccattaccaatcaacaatgctttatcttcttcaaccaacgtttcttcggtataaaaggaggaactgactttaaatccgtcggtgcattgatcgttttggctcttggtcgttttaatactgaacgttttgctcattgtgtggcgacgtatatccagcaaattaaatttaccaaaatcaatcacctgtgtttccggactaatggaaaaattgacgctgcaatccagcacgcgaatgttttccagaccagtaatatgatatttcaggttttgggcagtagggtcttcgttaacgctaccggcaccgtcaaattgcacgacgatatagtcgctaagcgtactttgataatcatgcggcggcatttctcgtattttgacgtataaccgcatgcgagcgagaaaggtacggctcatatgaatattagcgggatcgccgctgcaaattttgttctgccatcccatcgcgatgatctgctcaggggtataaatatcaatgttcttactgtcgatacactggttagtgtcgatgcgactttttcccagactggcatcgtaatcgacaccgttgtatgtcacgccgagttgataataacgatcctgcacccccggataggggtttacccaggcgtagacatgctcgctttcaaagttgccgttggtattgttgtcacaatagacgggaattttaatatcgtcagattcccagatcttatcaccgggtttggcattgcctggtacagcaaacggttgaatcgcttcacttttttctactgcgccaccagatgtaccaaaatagcagttcagcgccattgcagacttcaacggcagaaataacaggcagatgacgagcaacaatcccttgccagcactcatttcgcctccactgcttgtaaacggcattgtccgctgcagttgagcgtcgtcatgcgtaatgcgccgtaatcatccatgtaaccgagataaaactggctgccgctataacttccggtgtttgtgttgaccgtactaaaaggtgcaaccatcacggttttgaagcctgggagaacgcctttttcatttctccccagataggcaatggtcagataatacgcggtaggatttttcagtgtcagttggttgccctgctggctgacctgtaactgcagttcgaccttttctcctgctttcttgcgtaatgcagccggtcgccagaacaatttaatacgactttgaatagcgacctgaagtatcgcatggtcgctgcttttatccggagcgggaggaatttcgcgcatattgtagaaaaatagcgtttcgcgatcgccaggtaattgtgtggtactggcttgtttcacaacccgcacctggcttgtcgctttcggttccagacgttgaatagggggcaaagcgaccagaagagcatcgcttttctcccctttttcattttctatccaggaataagcaagataaggcagtttgtcactttggttttcgatacgcaggctggtggctttgtcattggcgttaaacacaatgcgtgtgcgatcgggttgcaccgcagcattgcaacccaagctgatggttaacaacattaagggtaatcctttaataaatgtcattctcttttccttaattaatgacaaggtaaaatcaggcgtttggtcgtgtcttccagacgttctggcagatgaataatgcagctttgctcaccccagaccacggtaaacagttgattttcagcgacaccgcttaaccaggcatgtccttcctcgccaaccatacccacgctaatgccgctgtcatcctggcggatatccgcaccgaggggagggaactgaccgctggcgttgcgtatgatgacgttaacgtctttaccggaacgggaagccagacttttgtaacctatcgcgccttcaatccatgtttccttgatgacgttttctgcaactgttacgccgtcgggtaagtcattcatgttcaccgccacggtggaaggctggtaactggaaatcaacggcaccaccgcaatgccaaaatggttggtgtagtcgagattgccctgaaccggaatatctgccacgccatcggtgctgaccatcaggcgtggttcattggtggagctgcggcgatgaaatgctgcaccatattgggttgcggtgaaagaaccgctccagctgctgctgacggaactgtaatcactggcggcataggtaccagaaatatcccactcacccgcactactcaggtgctgatagttaccgctcacctgggctccattgtccggacgatcggattgcagtccggcagacatgccccagctattacgttcatccagcgtatcgttccagctcatgcggtgtatggtgctgtggctactgttttgcatgtcatagccaacccgaccaccgttaccgaaggggaggctaatgctcagataaatctggttgtcgcgatctttatcttcgtagtgggtcgtattgaaactcgtgctaatgctgatatctctccagtcaccaatatcaacattaaaacctgctgtgatgttggcggtcgtggaggcgtctgcattccaccaggtttgatgtagcaggttggcgtaaagattgaggtttagtggggtaatcggttggcccacggataagctgatcgtctgtttttcgtcctgcgcatcgctgtcgttgtatttgtgatccagatagttggcgtagctgtgaaaatgacgatcactgaagcgataagcggcgaggctaatcgtgctgttggtggcatccacttgtttgctgtaattaaaacggtagcttaagccccgctcgtcctgctgagtatcaaaatggctactggcccaggtgacatcaaaggacagtgcgccaagccacagcatattttgcccgatacccattgcggcagaatggtagtcatcatcagaaatcagcaggccgccgtacaggctggtgttactgagcatcccccaggaaacttcattgctaaaaaaggtttcattttcagtttgatgactcatggaaggccgtggctgacccgcggccaatttatagcgaacctgtccctggcgagtcaggaagggcgtgcttgctgcgctaacctggaaattgttcacccgaccatcttcttccgtcactttgacatccagcgtgccctgaacagactgattgaggtcatcaataataaacgggcctggcgggacttttttctggtaaatgacgcggccactttgactgatcgtcaccgtggcattggtctgtgcaataccgctaatttgtggggcgtagccacgcagctcccacggtaacattcgatcgtcactcgccagtgccgcgccggtataagaaaaaccatcgaaaatattggaactgaaatcggtttcgccgagggttaacttagagcctaattgcggtaatggacgaaaaagataggtgcggcttattccgccactctggtcatggttatcttcgctatcggtcttattaagctggtaatcactgcgtaagcgccatgccccggcgttaattccggcggtaccgtaggcattcaggttagtgctgctgctgccgtcctgtgggcggtagctgctggcaaacaagttgtaatccatcaggacaccggcaacaccttctttccatgtagaggggggagcccagttttcactgtgccacgccagccaggcttgcggaatactaatattcagttgctgattggcttgatcgaaattgaagagcatttcaggtcgggaactgaaatcaatacaccgatctatctgtggcaaggactgacggacatctggttttaaaccaaatttatcgaccagactatcattgatgcatggaatggttttgtcaccctttttttgccagttaattttttgcccattactgattttgttgttattcaccgcaacgctaacaaaatattcaccgggagcaatgactcctttttcctttaataaactaatatcaatgcggtcgcgcatacttttatcgagaacattcagattgaattcgaccgccattgcgcaaggcatcgccatgaccaggcaggatacaaaagagagtcgataaatattcacggtgtccatacctgataaatattttatgaaaggcggcgatgatgccgccaaaataatacttatttataatccagcacgtaggttgcgttagcggttacttcacctgccgtgacatcgactgcattatcaatttgttccatccaggcgaaaaagttcagcgtctgttcactactgcttgcatccaggtcaagatctggcgcggcactacctaatacgatgttaccgtcatttttgtccatcagtcgtacaccgaccccagttgcttcgcctgcactggtgttgctcaacaaaggcgtagcaccagttgtcttagccgtgctatcgaaggttacgccaactttggataccggcattccgctaccgttgtcagaagcaggcagatcacagttgatcaagcgaatgtcgacggccactttattgctatgatgctcccggtttatatgggttgtcgtgacttgtccaagatctatgtttttatcaatatcttctggatgaatttcacaaggtgcttcaataacctcccccttaaagtgaatttcgccagaaccttcatcagcagcataaacaggtgcagtgaacagcagagatacggccagtgcggccaatgttttttgtcctttaaacataacagagtcctttaaggatatagaataggggtatagctacgccagaatatcgtatttgattattgctagtttttagttttgcttaaaaatattgttagttttattaaatgcaaaactaaattattggtatcatgaatttgttgtatgatgaataaaatataggggggtatagatagacgtcattttcatagggttataaatgcgactaccatgaagtttttaattgaaagtattgggttgctgataatttgagctgttctattctttttaaatatctatataggtctgttaatggattttatttttacaattttttgtgtttaggcatataaaaatcaacccgccatatgaacggcgggttaaaatatttacaacttagcaatcaaccattaacgcttgatatcgcttttaaagtcgcgtttttcatatcctgtatacagctgacgcggacgggcaatcttcataccgtcactgtgcatttcgctccagtgggcgatccagccaacggtacgtgccattgcgaaaatgacggtgaacatggaagacggaatacccatcgctttcaggatgataccagagtagaaatcgacgttcgggtacagtttcttctcgataaagtacgggtcgttcagcgcgatgttttccagctccatagccacttccagcaggtcatccttcgtgcccagctctttcagcacttcatggcaggtttcacgcattacggtggcgcgcgggtcgtaatttttgtacacgcggtgaccgaagcccatcaggcggaaagaatcatttttgtctttcgcacgacgaacaaattccggaatgtgtttaacggagctgatttcttccagcattttcagcgccgcttcgttagcaccgccgtgcgcaggtccccacagactagcaatacctgctgcgatacaggcaaacgggttcgcaccgctagagccagcggtacgcacggtggaggtagaggcgttctgttcatggtcagcgtgcaggatcagaatacggtccatagcacgttccagaatcggattaacttcatacggttcgcacggcgtggagaacatcatattcaggaagttaccggcgtaggagagatcgttgcgcgggtaaacaaatggctgaccaatggaatacttgtaacacatcgcggccatggtcggcattttgctcagcaggcggaacgcggcaatttcacggtgacgaggattgttaacatccaggctgtcgtgatagaacgccgccagcgcgccggtaataccacacatgactgccattggatggctgtcgcgacggaaagcatggaacagacgggtaatctgctcgtggatcatggtatgacgggtcaccgtagttttaaattcgtcatactgttcctgagtcggtttttcaccattcagcaggatgtaacaaacttccaggtagttagaatcggtcgccagctgatcgatcgggaaaccgcggtgcagcaaaataccttcatcaccatcaataaaagtaattttagattcgcaggatgcggtactagtgaagcctgggtcaaaggtgaacacacctttactaccgagagtacggatatcaataacatcttgacccagcgtgcctttcagcacatccagttcaacagctgtatccccgttgagggtgagttttgcttttgtatcagccatttaaggtctccttagcgccttattgcgtaagactgccggaacttaaatttgccttcgcacatcaacctggctttacccgttttttatttggctcgccgctctgtgaaagaggggaaaacctgggtacagagctctgggcgcttgcaggtaaaggatccattgatgacgaataaatggcgaatcaagtacttagcaatccgaattattaaacttgtctaccactaataactgtcccgaatgaattggtcaatacttccacactgttacataagttaatcttaggtgaaataccgacttcataacttttacgcattatatgcttttcctggtaatgtttgtaacaactttgttgaatgattgtcaaattagatgattaaaaattaaataaatgttgttatcgtgacctggatcactgttcaggataaaacccgacaaactatatgtaggttaattgtaatgattttgtgaacagcctatactgccgccaggtctccggaacaccctgcaatcccgagccacccagcgttgtaacgtgtcgttttcgcatctggaagcagtgttttgcatgacgcgcagttatagaaaggacgctgtctgacccgcaagcagaccggaggaaggaaatcccgacgtctccaggtaacagaaagttaacctctgtgcccgtagtccccagggaataataagaacagcatgtgggcgttattcatgataagaaatgtgaaaaaacaaagacctgttaatctggacctacagaccatccggttccccatcacggcgatagcgtccattctccatcgcgtttccggtgtgatcacctttgttgcagtgggcatcctgctgtggcttctgggtaccagcctctcttcccctgaaggtttcgagcaagcttccgcgattatgggcagcttcttcgtcaaatttatcatgtggggcatccttaccgctctggcgtatcacgtcgtcgtaggtattcgccacatgatgatggattttggctatctggaagaaacattcgaagcgggtaaacgctccgccaaaatctcctttgttattactgtcgtgcttagtcttctcgcaggagtcctcgtatggtaagcaacgcctccgcattaggacgcaatggcgtacatgatttcatcctcgttcgcgctaccgctatcgtcctgacgctctacatcatttatatggtcggttttttcgctaccagtggcgagctgacatatgaagtctggatcggtttcttcgcctctgcgttcaccaaagtgttcaccctgctggcgctgttttctatcttgatccatgcctggatcggcatgtggcaggtgttgaccgactacgttaaaccgctggctttgcgcctgatgctgcaactggtgattgtcgttgcactggtggtttacgtgatttatggattcgttgtggtgtggggtgtgtgatgaaattgccagtcagagaatttgatgcagttgtgattggtgccggtggcgcaggtatgcgcgcggcgctgcaaatttcccagagcggccagacctgtgcgctgctctctaaagtcttcccgacccgttcccataccgtttctgcgcaaggcggcattaccgttgcgctgggtaatacccatgaagataactgggaatggcatatgtacgacaccgtgaaagggagcgactatatcggtgaccaggacgcgattgaatatatgtgtaaaaccgggccggaagcgattctggaactcgaacacatgggcctgccgttcagccgtctcgatgatggtcgtatctatcaacgtccgtttggcggtcagagcaaaaacttcggcggcgagcaggcggcacgcactgcggcagcagctgaccgtaccggtcacgcactgttgcacacgctttatcagcagaacctgaaaaaccacaccaccattttctccgagtggtatgcgctggatctggtgaaaaaccaggatggcgcggtggtgggttgtaccgcactgtgcatcgaaaccggtgaagtggtttatttcaaagcccgcgctaccgtgctggcgactggcggagcagggcgtatttatcagtccaccaccaacgcccacattaacaccggcgacggtgtcggcatggctatccgtgccggcgtaccggtgcaggatatggaaatgtggcagttccacccgaccggcattgccggtgcgggcgtactggtcaccgaaggttgccgtggtgaaggcggttatctgctgaacaaacatggcgaacgttttatggagcgttatgcgccgaacgccaaagacctggcgggccgtgacgtggttgcgcgttccatcatgatcgaaatccgtgaaggtcgcggctgtgatggtccgtgggggccacacgcgaaactgaaactcgatcacctgggtaaagaagttctcgaatcccgtctgccgggtatcctggagctttcccgtaccttcgctcacgtcgatccggtgaaagagccgattccggttatcccaacctgtcactacatgatgggcggtattccgaccaaagttaccggtcaggcactgactgtgaatgagaaaggcgaagatgtggttgttccgggactgtttgccgttggtgaaatcgcttgtgtaagcgtacacggcgctaaccgtctgggcggcaacagcctgctggacctggtggtctttggtcgcgcggcaggtctgcatctgcaagagtctatcgccgagcagggcgcactgcgcgatgccagcgagtctgatgttgaagcgtctctggatcgcctgaaccgctggaacaataatcgtaacggtgaagatccggtggcgatccgtaaagcgctgcaagaatgtatgcagcataacttcagcgtcttccgtgaaggtgatgcgatggcgaaagggcttgagcagttgaaagtgatccgcgagcgtctgaaaaatgcccgtctggatgacacttccagcgagttcaacacccagcgcgttgagtgcctggaactggataacctgatggaaacggcgtatgcaacggctgtttctgccaacttccgtaccgaaagccgtggcgcgcatagccgcttcgacttcccggatcgtgatgatgaaaactggctgtgccactccctgtatctgccagagagcgaatccatgacgcgccgaagcgtcaacatggaaccgaaactgcgcccggcattcccgccgaagattcgtacttactaatgcggagacaggaaaatgagactcgagtttagtatttatcgctataacccggatgttgatgatgctccgcgtatgcaggattacaccctggaagcggatgaaggtcgcgacatgatgctgctggatgcgcttatccagctaaaagagaaagatcccagcctgagcttccgccgctcctgccgtgaaggtgtgtgcggttccgacggtctgaacatgaacggcaagaatggtctggcctgtattaccccgattagcgcactcaaccagccgggcaagaagattgtgattcgcccgctgccaggtttaccggtgatccgcgatttggtggtagacatgggacaattctatgcgcaatatgagaaaattaagccttacctgttgaataatggacaaaatccgccagctcgcgagcatttacagatgccagagcagcgcgaaaaactcgacgggctgtatgaatgtattctctgcgcatgttgtagtacctcttgtccgtctttctggtggaatcccgataagtttatcggcccggcaggcttgttagcggcatatcgtttcctgattgatagccgtgataccgagactgacagccgcctcgacggtttgagtgatgcattcagcgtattccgctgtcacagcatcatgaactgcgtcagtgtatgtccgaaggggctgaacccgacgcgcgccatcggccatatcaagagcatgttgttgcaacgtaatgcgtaaaccgtaggcctgataagacgcgcaagcgtcgcatcaggcaaccagtgccggatgcggcgtgaacgccttatccggcctacaagtcattacccgtaggcctgataagcgcagcgcatcaggcgtaacaaagaaatgcaggaaatctttaaaaactgcccctgacactaagacagtttttaaaggttccttcgcgagccactacgtagacaagagctcgcaagtgaaccccggcacgcacatcactgtgcgtggtagtatccacggcgaagtaagcataaaaaagatgcttaagggatcacgatgcagaacagcgctttgaaagcctggttggactcttcttacctctctggcgcaaaccagagctggatagaacagctctatgaagacttcttaaccgatcctgacagcgttgacgctaactggcgtaacacgttccagcagttacctggtacgggagtcaaaccggatcaattccactctcaaacgcgtgaatatttccgccgcctggcgaaagacgctagtcgttactctagtacgatctccgaccctgacaccaatgtgaagcaggttaaagtcctgcagctcattaacgcataccgcttccgtggtcaccagcatgcgaatctcgatccgctgggactgtggcagcaagataaagtggccgatctggatccgtctttccacgatctgaccgaagcagacttccaggagaccttcaacgtcggtagttttgccagcggcaaagaaaccatgaaactcggcgagctgctggaagccctcaagcaaacctactgcggcccgattggtgccgagtatatgcacattaccagcaccgaagaaaaacgctggatccaacagcgtatcgagtctggtcgcgcgactttcaatagcgaagagaaaaaacgcttcttaagcgaactgaccgccgctgaaggtcttgaacgttacctcggcgcaaaattccctggcgcaaaacgcttcagcctggaaggcggtgacgcgttaatcccgatgcttaaagagatgatccgccacgctggcaacagcggcacccgcgaagtggttctcgggatggcgcaccgtggtcgtctgaacgtgctggtgaacgtgctgggtaaaaaaccgcaagacttgttcgacgagttcgccggtaaacataaagaacacctcggcacgggtgacgtgaaataccacatgggcttcagctctgacttccagaccgatggcggcctggtgcacctggcgctggcgtttaacccgtctcaccttgagattgtaagcccggtagttatcggttctgttcgtgcccgtctggacagacttgatgagccgagcagcaacaaagtgctgccaatcaccatccacggtgacgccgcagtgaccgggcagggcgtggttcaggaaaccctgaacatgagcaaagcgcgtggttatgaagttggcggtacggtacgtatcgttatcaacaaccaggttggtttcaccacctctaatccgctggatgcccgttctacgccgtactgtactgatatcggtaagatggttcaggccccgattttccacgttaacgcggacgatccggaagccgttgcctttgtgacccgtctggcgctcgatttccgtaacacctttaaacgtgatgtcttcatcgacctggtgtgctaccgccgtcacggccacaacgaagccgacgagccgagcgcaacccagccgctgatgtatcagaaaatcaaaaaacatccgacaccgcgcaaaatctacgctgacaagctggagcaggaaaaagtggcgacgctggaagatgccaccgagatggttaacctgtaccgcgatgcgctggatgctggcgattgcgtagtggcagagtggcgtccgatgaacatgcactctttcacctggagcccgtacctcaaccacgaatgggacgaagagtacccgaacaaagttgagatgaagcgcctgcaggagctggcgaaacgcatcagcacggtgccggaagcagttgaaatgcagtctcgcgttgccaagatttatggcgatcgccaggcgatggctgccggtgagaaactgttcgactggggcggtgcggaaaacctcgcttacgccacgctggttgatgaaggcattccggttcgcctgagcggtgaagactccggtcgcggtaccttcttccaccgccacgcggtgatccacaaccagtctaacggttccacttacacgccgctgcaacatatccataacgggcagggcgcgttccgtgtctgggactccgtactgtctgaagaagcagtgctggcgtttgaatatggttatgccaccgcagaaccacgcactctgaccatctgggaagcgcagttcggtgacttcgccaacggtgcgcaggtggttatcgaccagttcatctcctctggcgaacagaaatggggccggatgtgtggtctggtgatgttgctgccgcacggttacgaagggcaggggccggagcactcctccgcgcgtctggaacgttatctgcaactttgtgctgagcaaaacatgcaggtttgcgtaccgtctaccccggcacaggtttaccacatgctgcgtcgtcaggcgctgcgcgggatgcgtcgtccgctggtcgtgatgagcccgaaatccctgctgcgtcatccgctggcggtttccagcctcgaagaactggcgaacggcaccttcctgccagccatcggtgaaatcgacgagcttgatccgaagggcgtgaagcgcgtagtgatgtgttctggtaaggtttattacgacctgctggaacagcgtcgtaagaacaatcaacacgatgtcgccattgtgcgtatcgagcaactctacccgttcccgcataaagcgatgcaggaagtgttgcagcagtttgctcacgtcaaggattttgtctggtgccaggaagagccgctcaaccagggcgcatggtactgcagccagcatcatttccgtgaagtgattccgtttggggcttctctgcgttatgcaggccgcccggcctccgcctctccggcggtagggtatatgtccgttcaccagaaacagcaacaagatctggttaatgacgcgctgaacgtcgaataaataaaggatacacaatgagtagcgtagatattctggtccctgacctgcctgaatccgtagccgatgccaccgtcgcaacctggcataaaaaacccggcgacgcagtcgtacgtgatgaagtgctggtagaaatcgaaactgacaaagtggtactggaagtaccggcaagtgcagacggcattctggatgcggttctggaagatgaaggtacaacggtaacgtctcgtcagatccttggtcgcctgcgtgaaggcaacagcgccggtaaagaaaccagcgccaaatctgaagagaaagcgtccactccggcgcaacgccagcaggcgtctctggaagagcaaaacaacgatgcgttaagcccggcgatccgtcgcctgctggctgaacacaatctcgacgccagcgccattaaaggcaccggtgtgggtggtcgtctgactcgtgaagatgtggaaaaacatctggcgaaagccccggcgaaagagtctgctccggcagcggctgctccggcggcgcaaccggctctggctgcacgtagtgaaaaacgtgtcccgatgactcgcctgcgtaagcgtgtggcagagcgtctgctggaagcgaaaaactccaccgccatgctgaccacgttcaacgaagtcaacatgaagccgattatggatctgcgtaagcagtacggtgaagcgtttgaaaaacgccacggcatccgtctgggctttatgtccttctacgtgaaagcggtggttgaagccctgaaacgttacccggaagtgaacgcttctatcgacggcgatgacgtggtttaccacaactatttcgacgtcagcatggcggtttctacgccgcgcggcctggtgacgccggttctgcgtgatgtcgataccctcggcatggcagacatcgagaagaaaatcaaagagctggcagtcaaaggccgtgacggcaagctgaccgttgaagatctgaccggtggtaacttcaccatcaccaacggtggtgtgttcggttccctgatgtctacgccgatcatcaacccgccgcagagcgcaattctgggtatgcacgctatcaaagatcgtccgatggcggtgaatggtcaggttgagatcctgccgatgatgtacctggcgctgtcctacgatcaccgtctgatcgatggtcgcgaatccgtgggcttcctggtaacgatcaaagagttgctggaagatccgacgcgtctgctgctggacgtgtaatagtttaagtttcacctgcactgtagaccggataaggcattatcgccttctccggcaattgaagcctgatgcgacgctgacgcgtcttatcaggcctacgggaccaccaatgtaggtcggataaggcgcaagcgccgcatccgacaagcgatgcctgatgtgacgtttaacgtgtcttatcaggcctacgggtgaccgacaatgcccggaagcgatacgaaatattcggtctacggtttaaaagataacgattactgaaggatggacagaacacatgaacttacatgaatatcaggcaaaacaactttttgcccgctatggcttaccagcaccggtgggttatgcctgtactactccgcgcgaagcagaagaagccgctagtaaaatcggtgccggtccgtgggtagtgaaatgtcaggttcacgctggtggccgcggtaaagcgggcggtgtgaaagttgtaaacagcaaagaagacatccgtgcttttgcagaaaactggctgggcaagcgtctggtaacgtatcaaacagatgccaatggccaaccggttaaccagattctggttgaagcagcgaccgatatcgctaaagagctgtatctcggtgccgttgttgaccgtagttcccgtcgtgtggtctttatggcctccaccgaaggcggcgtggaaatcgaaaaagtggcggaagaaactccgcacctgatccataaagttgcgcttgatccgctgactggcccgatgccgtatcagggacgcgagctggcgttcaaactgggtctggaaggtaaactggttcagcagttcaccaaaatcttcatgggcctggcgaccattttcctggagcgcgacctggcgttgatcgaaatcaacccgctggtcatcaccaaacagggcgatctgatttgcctcgacggcaaactgggcgctgacggcaacgcactgttccgccagcctgatctgcgcgaaatgcgtgaccagagccaggaagatccgcgtgaagcacaggctgcacagtgggaactgaactacgttgcgctggacggtaacatcggttgtatggttaacggcgcaggtctggcgatgggtacgatggacatcgttaaactgcacggcggcgaaccggctaacttccttgacgttggcggcggcgcaaccaaagaacgtgtaaccgaagcgttcaaaatcatcctctctgacgacaaagtgaaagccgttctggttaacatcttcggcggtatcgttcgttgcgacctgatcgctgacggtatcatcggcgcggtagcagaagtgggtgttaacgtaccggtcgtggtacgtctggaaggtaacaacgccgaactcggcgcgaagaaactggctgacagcggcctgaatattattgcagcaaaaggtctgacggatgcagctcagcaggttgttgccgcagtggaggggaaataatgtccattttaatcgataaaaacaccaaggttatctgccagggctttaccggtagccaggggactttccacagtgaacaggccattgcatacggcactaaaatggttggcggcgtaaccccaggtaaaggcggcaccacccacctcggcctgccggtgttcaacaccgtgcgtgaagccgttgctgccactggcgctaccgcttctgttatctacgtaccagcaccgttctgcaaagactccattctggaagccatcgacgcaggcatcaaactgattatcaccatcactgaaggcatcccgacgctggatatgctgaccgtgaaagtgaagctggatgaagcaggcgttcgtatgatcggcccgaactgcccaggcgttatcactccgggtgaatgcaaaatcggtatccagcctggtcacattcacaaaccgggtaaagtgggtatcgtttcccgttccggtacactgacctatgaagcggttaaacagaccacggattacggtttcggtcagagcacctgtgtcggtatcggcggtgacccgatcccgggctctaactttatcgacattctcgaaatgttcgaaaaagatccgcagaccgaagcgatcgtgatgatcggtgagatcggcggtagcgctgaagaagaagcagctgcgtacatcaaagagcacgttaccaagccagttgtgggttacatcgctggtgtgactgcgccgaaaggcaaacgtatgggccacgcgggtgccatcattgccggtgggaaagggactgcggatgagaaattcgctgctctggaagccgcaggcgtgaaaaccgttcgcagcctggcggatatcggtgaagcactgaaaactgttctgaaataaatatctgtaataagaaatagccctcgccgcttccctctacaggaatggcgaagggctgtcggtttcgacatggttggccatcgtatgatggccttttttgtgcttatcggctactttttcgctgcgctatcagggtaaatttatagtcatcggtattaaaagcgttgcggctatattcaaacacccgaccatcaactaaatatccacggcttactttttcaagaatcggctttgtctggctgatattaagcagacggctcatctcttcggttggcatcagaggaatgatttcctgttcgctacgatcgataaccattttcttcacttcttcgataaagtgatatttgctattttccatgacctgccaggtgagatccgggaacaacgcaagcggcatccaggtttcttccagcgccattggcttttgcttgcgatagcgcacgcgcttcacatgccacacacgatcctgcggggtgatttgtagctgttgctgaagaaaatcgtcagccggaatcacttcgaatatcagaacttcactgtgtgtatcgacgtgacggtcgctcagtttttcatcaaaactggttaactgaaaaatatcgtaattgacccgctcttctttgacgtaagtcccgctgccctgaatgctttcgaggatctgctgctcgactagctggcgcaaagcctgacgcaccgtaacccggctgacgccaaactctgtttgtagcgcactttcagtgggtaacgcatcgccaggtttaagctcgccacgcgcaatttgttcacgaatgcgatcggcaatctgccggtataagggcttgtgtcccatttttagtatctcattaatacgaatttaaccattatgcccgataaattcatcctgtaaataatacaaatacaatacaaataatttcaatcaagtgaaattgatcacataatggtattgttttatcgggcacactggcgcgactataaaaacgatcaagtgaggatcatgatgaatctgacgactctgacccaccgcgatgcgttgtgtctgaatgcgcgctttaccagccgtgaagaggccatccacgcgttgactcaacgtcttgctgctctggggaaaatttccagtactgagcaatttctggaagaagtgtatcgccgtgaaagccttggcccgaccgccttaggtgaagggttggctgtgccgcatggcaaaactgctgcggtaaaagaagcggcgtttgcggtcgccacactcagcgagccgcttcagtgggaaggcgttgatggcccggaagcagttgatttagtggtgctgctggcgattccccccaatgaagcgggtactacgcatatgcaactgctgacagcgctgaccacgcgccttgcggatgatgagattcgggcgcgtatacagagcgcgacgacgcctgatgagttgctcagcgcgctggatgacaagggaggcacgcaaccttctgcctctttttccaacgcgccaactatcgtctgcgtaacggcctgtccggcgggtattgctcacacctatatggctgcggaatatctggaaaaagccggacgcaaactcggcgtaaatgtttacgttgaaaaacaaggcgctaacggcattgaagggcgtttaacggcggatcaactcaatagtgcaaccgcctgtatttttgcggctgaagtcgccatcaaggagagtgagcgttttaatggcattcccgcgcttagtgtgcctgttgccgagccgattcgccatgcagaagcgttgatccaacaagcgcttaccctcaagcgtagcgatgagacgcgtaccgtacagcaagatacgcaaccggtgaaaagtgtcaaaacggagctgaaacaggcactgttgagcggaatctcttttgccgtaccgttgattgtcgcggggggcacggtgctggcggtcgcggtattactgagccaaatcttcgggctacaagatctgtttaatgaagaaaactcctggctgtggatgtaccgcaagctgggcggcgggctgctcggaattttgatggtaccggtgctcgcggcctataccgcctattctctggcagataaaccggcgttagcgccaggctttgcggctggacttgccgccaacatgatcggctccgggtttctcggcgcggtcgttggcggattgatagccggttacttgatgcgctgggtgaaaaatcacttgcgtcttagcagtaaattcaatggattcctgactttttatctctacccggtgctcggtacgttgggagcgggcagtctgatgctgtttgtggtgggggaacctgtcgcctggatcaataacagccttaccgcctggctgaacggtctgagtggaagtaacgcgctgttgctgggtgccattctcggttttatgtgttcctttgaccttggagggccagtgaataaagccgcttatgcattctgcctgggcgcaatggcgaacggcgtttacggcccgtatgccattttcgcctccgtcaaaatggttagcgcatttaccgtaaccgcttccacgatgctcgcaccgcgcctgtttaaagagtttgaaattgagaccgggaaatccacctggctgttagggctggcaggtattaccgaaggggcgatcccgatggcgattgaagatccgctgcgggttattggtagctttgtgctgggctctatggtaacgggcgctattgtcggtgcgatgaatatcggccttagcacacccggtgccggcattttcagcctctttttacttcatgataatggcgcgggcggtgttatggcggcaattggctggtttggcgcggcattggtgggggctgcaatcagcactgcaattctcctgatgtggcggcgtcacgcggttaagcatggcaactatctgactgatggcgtaatgccataaacaaaaaggaaacgacgatgaaagcagtatctcgcgttcacatcaccccgcatatgcactgggatcgagagtggtatttcaccaccgaagagagtcgtattctgctggtcaataatatggaagagatcctgtgccgactggaacaggacaacgaatacaaatattacgtactcgacgggcaaacggcgatcctcgaagattatttcgcggtgaaaccggaaaacaaagaccgtgtgaagaaacaggtagaagccggcaagttgattatcggcccctggtatacccagaccgataccacgattgtttctgcggaatccatcgtccgtaatctgatgtacggaatgcgtgactgcctcgcgtttggcgagccgatgaaaataggttatttaccagattcctttggcatgtccgggcaactgccgcatatctacaatggatttggcattacccgcaccatgttctggcgcggatgtagcgagcgccacggtactgataaaaccgagtttttgtggcaaagcagtgacggtagcgaagtgacggcgcaggtgctgccgctgggctacgccatcggtaagtacttacctgccgacgaaaacggattacgtaaacgcctcgacagttattttgacgtgctggaaaaagcgtctgtaaccaaagagattttgctgccgaatgggcatgaccagatgccattgcagcaaaatatcttcgaagtgatggataagctacgtgagatctaccctcaacgtaagtttgtgatgagccgctttgaagaggtatttgagaagatcgaagcgcagcgagataatctggcaaccctgaaaggggaatttattgatggcaaatatatgcgcgtgcatcgcaccatcggttctacgcgtatggatatcaaaattgcccacgcgcgtattgaaaataagattgttaatctgctggaaccgctggcaacactggcctggacgttgggttttgaataccaccacggcttgctggagaaaatgtggaaagagatcttaaaaaatcatgcccacgacagtatcggctgctgctgtagtgacaaagttcatcgcgaaatcgtcgcccgcttcgaactggctgaagacatggcggataatctgattcgtttctacatgcgcaaaattgccgacaacatgccgcagagcgacgccgacaaactcgtcctgtttaacctgatgccctggccgcgtgaagaagttatcaacaccactgtgcggctgcgcgccagccagtttaatttgcgggacgatcgcggtcagcctgtaccgtattttattcgccatgcccgtgagatcgatccaggcctaatcgatcggcaaatagttcattacggtaattacgatccctttatggagtttgatatacagatcaaccagattgtcccttctatgggctatcgcacgctttatatcgaagcgaatcagcctggcaacgtaattgcggcaaaaagtgacgctgaagggatactggaaaatgctttctggcaaattgcgctcaatgaggatggttctctgcaactggtagataaagacagcggtgtgcgctatgaccgggtattgcaaattgaagaaagctctgatgatggtgatgaatatgactatagtcccgcaaaagaagagtgggtaattaccgcagcgaacgcgaaaccgcaatgcgatattattcatgaagcctggcagagcagggctgttatccgctatgacatggcagtgccgctcaatttgagtgaacgcagcgcccggcaatccactggcagagtaggggtggtgttggttgtcactcttagtcataacagcaggcgtattgatgtggatatcaatcttgataaccaggctgacgatcatcgccttcgtgtcctggtccctacaccttttaacaccgacagtgttctggcagatacgcagtttggtagcctaacgcgccccgtgaacgacagtgcaatgaacaactggcagcaagaaggctggaaagaagcgccggttccggtatggaatatgctcaactatgttgccttacaggaagggcgtaacggcatggctgtctttagcgaagggttacgtgaatttgaagtcatcggtgaagagaagaaaacctttgccattacgttgctgcgtggcgtgggcttactgggcaaagaagatctgcttttaaggcctgggcggcctagcggaattaaaatgccagtcccggacagtcaactacgtggtctgctttcttgtcgcctaagtttattgagttataccggtacgccaaccgccgctggtgtagctcagcaggcgcgagcatggctgactccagtacagtgttacaacaaaatcccatgggatgtgatgaagctcaacaaagccggattcaacgtgccggaaagttatagtttgttgaaaatgcccccagtgggatgcctgataagcgcacttaagaaagctgaagaccgacaagaagtgattttacggctgtttaatccggctgaaagtgcaacctgtgatgcgactgttgctttcagtcgcgaggtgatttcttgcagtgaaacgatgatggatgaacacattaccaccgaggaaaatcaaggtagtaatctaagcgggccttttttacccggccagagtcggacgttcagttaccggcttgcctgaatagcaatcaaaccgaagccacatatgcgcggccagattgttgacaaagggcgctttgttcatgccggatacggcatgaacgctttattcggtctacaaaagcaggcaaattcaatatattgcagagatgatgtagacactggcaagcgtagcgcatcaggtaattttgcgtttatcttcactctcaagccacgtatatgtggctttatttttaacaaaataataaccctgggtgagttaattataatataattataagttaactaaatgttaatattggcggggtggatttatgcctttattagtaatcctgaaactctgcgtcgtattagccagtgaccaaaaaaagaattaaggtcaaccgtgctgtttttgcttcgtctctttttatctttaattgccaaccgaaactaatttcagccttataactcacacattttaaacataaatgtcactaaagttaccttattgaaacatgattaacataatttgtaggaattgatatttatcaatgtataagtcttggaaatgggcatcaaaaagagataaattgttctcgatcaaattggctgaaaggcggtaatttagctataaattgatcaccgtcgaaaaatgcaaatttgcttcaacaaaaacctgtttattgtaaggattttgcggcgtaatatatacgtgggatcaatttgagtttttattaacatgtttgcaacctttctttacgccgtttttgtgtgcattcacatggtatgatgaaagtgttcaaacaaatttctattggggcatgcgtgtgaccctttctaacggggttcactctcggagtcttcatgcgatgagcaaggagtcatgatgttagatatagtcgaactgagccgcttacagtttgccttgaccgcgatgtaccacttcctttttgtgccactgacgctcggtatggcgttcctgctggccattatggaaacggtctacgtcctctccggcaaacagatttataaagatatgaccaagttctggggcaagttgtttggtatcaacttcgctctgggtgtggctaccggtctgaccatggagttccagttcgggactaactggtcttactattcccactatgtaggggatatcttcggtgcgccgctggcaatcgaaggtctgatggccttcttcctcgaatccacctttgtaggtctgttcttcttcggttgggatcgtctgggtaaagttcagcatatgtgtgtcacctggctggtggcgctcggtagtaacctgtccgcactgtggattctggttgcgaacggctggatgcaaaacccaatcgcgtccgatttcaactttgaaactatgcgtatggagatggtgagcttctccgagctggtgcttaacccggttgctcaggtgaaattcgttcacactgtagcgtctggttatgtgactggcgcgatgttcatcctcggtatcagcgcatggtatatgctgaaaggtcgtgacttcgccttcgctaaacgctcctttgctatcgctgccagcttcggtatggctgctgttctgtctgttattgttctgggtgatgaatccggctacgaaatgggcgacgtgcagaaaaccaaactggctgctattgaagccgagtgggaaacgcaacctgcgcctgctgcctttactctgttcggcattcctgatcaggaagaggagacgaacaaatttgcgattcagatcccttacgcactgggcatcattgcaacgcgttccgtggataccccggttatcggcctgaaagagctgatggtgcagcatgaagaacgcattcgtaacgggatgaaggcgtactctctgctcgaacaactgcgttctggttctaccgaccaggcggttcgtgaccagttcaatagcatgaagaaagacctcggttacggtctgctgctgaaacgctatacgccaaacgtggctgatgcgactgaagcgcagattcaacaggcaaccaaagactccatcccgcgtgtagcgccgctgtactttgcgttccgtatcatggtggcgtgtggcttcctgcttctggcaatcatcgcgctctctttctggagtgtcatccgcaaccgcattggcgagaaaaaatggcttctgcgcgccgcgctgtacggtattccgctgccgtggattgctgtagaagcgggctggttcgtggctgaatatggccgccaaccgtgggctatcggtgaagtgctgccgacagctgtggcgaacagcagtctgaccgcaggcgatctcatcttcagtatggtgctgatttgcggcctgtataccctgttcctggtggcagaattgttcttaatgttcaagtttgcacgcctcggcccaagcagcctgaaaaccggtcgctatcactttgagcagtcttccacgactactcagccggcacgctaagacaggagtcgtcaaatgatcgattatgaagtattgcgttttatctggtggctgctggttggcgttctgctgattggttttgcagtcactgacggtttcgacatgggggtgggcatgctcacccgtttcctcggtcgtaacgacaccgagcgtcgaattatgattaactccattgcaccacactgggacggtaaccaggtttggctgatcaccgcgggcggcgcactctttgctgcctggccgatggtctatgccgctgcgttctccggcttctatgtggcgatgatcctcgtgctggcgtctttgttcttccgtccggtcggttttgactaccgctccaagattgaagaaacccgctggcgtaacatgtgggactggggcatcttcattggtagcttcgttccgccgctggtaattggtgtagcgttcggtaacctgttgcagggcgtaccgttcaacgttgatgaatatctgcgtctgtactacaccggtaacttcttccagttgcttaacccgttcggcctgctggcaggcgtggtgagcgtagggatgatcattactcagggcgcaacctatctgcaaatgcgtaccgtgggcgaactgcacctgcgtacccgtgcaacggctcaggtggctgcgctggtgacactggtctgtttcgcactggctggcgtatgggtgatgtacggtatcgatggttatgtcgtgaaaagcacaatggaccattacgcagcctctaacccactgaataaagaagtggttcgtgaagctggcgcatggctggttaacttcaacaacacgccaattctgtgggctattccggcactgggtgtggttctgccgctgctgaccatcctgactgcacgtatggataaagccgcgtgggcgtttgtgttctcctccctgacgctggcctgcatcatcctgacagccggtatcgcaatgttcccgtttgtgatgccgtccagcaccatgatgaacgcaagtctgacaatgtgggatgcaacttccagccagctgacgcttaacgtcatgacctgggttgcggtggttctggtaccgatcattctgctctacaccgcctggtgttactggaaaatgttcggtcgtatcaccaaagaagatattgaacgtaacacccactctctgtactaagtaaggagctaaaaatgtggtatttcgcatggattctgggaacgcttcttgcctgtagctttggggtaatcaccgcgctggcgcttgaacacgtcgaaagtggcaaagccggtcaagaagacatctgatgagtaagattatcgcgactttgtatgcggtaatggacaagcgccccctgcgggcgctttccttcgtgatggcgcttctgttagcaggatgtatgttttgggacccatctcgttttgccgcgaagaccagtgaactggaaatctggcatggtttattgctgatgtgggccgtctgtgctggtgtgattcacggcgtgggctttcgtccgcagaaggttctttggcaagggattttttgcccattgcttgccgatattgttctcattgtcgggctgattttcttcttcttttaaatcagaattctctttaaaaaattatgggccgctccaggcccataaatttttacgctcccttaacttgccctcattcccaaacctcaatcgcgcgcgtatagtagcagcgtttaaaagctctaacttttgttgcattaccgggatgtaaagtgaatacaacgctgtttcgatggccggttcgcgtctactatgaagataccgatgccggtggtgtggtgtaccacgccagttacgtcgctttttatgaaagagcacgcacagagatgctgcgtcatcatcacttcagtcagcaggcgctgatggctgaacgcgttgcctttgtggtacgtaaaatgacggtggaatattacgcacctgcgcggctcgacgatatgctcgaaatacagactgaaataacaagtatgcgtggcacctctttggttttcacgcaacgtattgtcaacgccgagaatactttgctgaatgaagcagaggttctggttgtttgcgttgacccactcaaaatgaagcctcgtgcgcttcccaagtctattgtcgcggagtttaagcagtgactgacatgaatatccttgatttgttcctgaaggctagccttctggttaaacttatcatgttgattttgattggttttagtatcgcatcttgggccattattatccagcggacccgtattcttaacgcagcggcgcgcgaagccgaagcgtttgaagataaattctggtctggaatcgaactctctcgcctctatcaagagagccaggggaaacgggataatctgactggtagcgaacaaatcttttacagcgggttcaaagagtttgtgcgcctgcatcgtgccaatagccatgcgccggaagccgtagtggaaggggcgagccgtgctatgcgtatctccatgaaccgtgaacttgaaaatctggaaacgcacattccgttcctcggtacggttggctccatcagcccgtatattggtctgtttggtacggtctgggggatcatgcacgcctttatcgccctcggggcggtaaaacaagcaacactgcaaatggttgcgcccggtatcgcagaagcgttgattgcgactgcaattggtctgtttgccgctatcccggcagttatggcctacaaccgcctcaaccagcgcgtaaacaaactggaactgaattacgacaactttatggaagagtttaccgcgattctgcaccgccaggcgtttaccgttagcgagagcaacaaggggtaagccatggccagagcgcgtggacgaggtcgtcgcgatctcaagtccgaaatcaacattgtaccgttgctggacgtactgctggtgctgttgctgatctttatggcgacagcgcccatcatcacccagagcgtggaggtcgatctgccagacgctactgaaagtcaggcggtgagcagtaacgataatccgccagtgattgttgaagtgtctggtattggtcagtacaccgtggtggttgagaaagatcgcctggagcgtttaccaccagagcaggtggtggcggaagtgtccagccgtttcaaggccaacccgaaaacggtctttctgatcggtggcgcaaaagatgtgccttacgatgaaataattaaagcactgaacttgttacatagtgcgggtgtgaaaagcgttggtttaatgacgcagcctatctaaacatctgcgtttcccttgcttgaaagagagcgggtaacaggcgaacagtttttggaaaccgagagtgagtaaggcaaccgaacaaaacgacaagctcaagcgggcgataattattagtgcagtgctgcatgtcatcttatttgcggcgctgatctggagtagcttcgatgagaatatagaagctagtgccggaggcggcggtggtagctccatcgacgctgtcttggttgatagtggtgcggtagttgagcagtacaaacgcatgcaaagccaggaaagtagcgcgaagcgttctgatgaacagcgcaagatgaaggaacagcaggctgctgaagaactgcgtgagaaacaagcggctgaacaggaacgcctgaagcaacttgagaaagagcggttagcggctcaggagcagaaaaagcaggctgaagaagccgcaaaacaggccgagttaaagcagaagcaagctgaagaggcggcagcgaaagcggcggcagatgctaaagcgaaggccgaagcagatgctaaagctgcggaagaagcagcgaagaaagcggctgcagacgcaaagaaaaaagcagaagcagaagccgccaaagccgcagccgaagcgcagaaaaaagccgaggcagccgctgcggcactgaagaagaaagcggaagcggcagaagcagctgcagctgaagcaagaaagaaagcggcaactgaagctgctgaaaaagccaaagcagaagctgagaagaaagcggctgctgaaaaggctgcagctgataagaaagcggcagcagagaaagctgcagccgacaaaaaagcagcagaaaaagcggctgctgaaaaggcagcagctgataagaaagcagcggcagaaaaagccgccgcagacaaaaaagcggcagcggcaaaagctgcagctgaaaaagccgctgcagcaaaagcggccgcagaggcagatgatattttcggtgagctaagctctggtaagaatgcaccgaaaacggggggaggggcgaaagggaacaatgctagccctgccgggagtggtaatactaaaaacaatggcgcaagtggggccgatatcaataactatgccgggcagattaaatctgctatcgaaagtaagttctatgacgcaagctcctatgcaggcaaaacctgtacgctgcgcataaaactggcacccgatggtatgttactggatatcaaacctgaaggtggcgatcccgcactttgtcaggctgcgttggcagcagctaaacttgcgaagatcccgaaaccaccaagccaggcagtatatgaagtgttcaaaaacgcgccattggacttcaaaccgtaatcgcgatgttgactgttcggacggtcaacatcaggcaccggttgccacggggttctggtagttttgtgtattttagtttgttaacattctgctaaattatcgtgggccatcggtccagataagggagatatgatgaagcaggcattacgagtagcatttggttttctcatactgtgggcaagtgttctgcatgctgaagtccgcattgtgatcgacagcggtgtagattccggtcgtcctattggtgttgttcctttccagtgggcggggcctggtgcggcacctgaagatattggcggcatcgttgctgctgacttgcgtaacagcggtaaatttaatccgttagatcgcgctcgtctgccacagcagccgggtagtgcgcaggaagtacaaccagctgcatggtccgcactgggcattgacgctgtagttgtcggtcaggtcactccgaatccggatggttcttacaatgttgcttatcaacttgttgacactggcggcgcaccgggtactgtacttgctcagaacagctacaaagtgaacaagcagtggctgcgttatgctggtcataccgccagtgatgaagtgtttgaaaaactgaccggcattaaaggtgcgttccgtactcgtattgcctacgttgttcagaccaacggcggtcagttcccgtatgaactgcgcgtatctgactatgacggttacaaccagtttgtcgttcaccgtagtccgcagccgctgatgtctccggcgtggagtccagacggttctaaactggcttatgtgaccttcgaaagcggtcgttccgcgctggttattcagacgctggcaaatggcgctgtacgtcaggtggctagtttcccgcgtcacaacggtgcacctgcattcagcccagacggcagcaaactggcattcgccttgagcaaaaccggtagtctgaacctgtacgtaatggatttggcttctggtcagatccgccaggtgactgatggtcgcagtaacaataccgaaccgacctggttcccggatagccagaacctggcatttacttctgaccaggccggtcgtccgcaggtttataaagtgaatatcaacggcggtgcgccacaacgtattacctgggaaggtagccagaaccaggatgcggatgtcagcagcgacggtaaatttatggtaatggtcagctccaatggtgggcagcagcacattgccaaacaagatctggcaacgggaggcgtacaagttctgagctccacgttcctggatgaaacgccaagtctggcacctaacggcactatggtaatctacagctcttctcaggggatgggatccgtgctgaatttggtttctacagatgggcgtttcaaagcgcgtcttccggcaactgatggacaggtcaaattccctgcctggagcccgtatctgtgataataattaattgaatagtaaaggaatcattgaaatgcaactgaacaaagtgctgaaagggctgatgattgctctgcctgttatggcaattgcggcatgttcttccaacaagaacgccagcaatgacggcagcgaaggcatgctgggtgccggcactggtatggatgcgaacggcggcaacggcaacatgtcttccgaagagcaggctcgtctgcaaatgcaacagctgcagcagaacaacatcgtttacttcgatctggacaagtacgatatccgttctgacttcgctcaaatgctggatgcacatgcaaacttcctgcgtagcaacccgtcttacaaagtcaccgtagaaggtcacgcggacgaacgtggtactccggaatacaacatctccctgggtgaacgtcgtgcgaacgccgttaagatgtacctgcagggtaaaggcgtttctgcagaccagatctccatcgtttcttacggtaaagaaaaacctgcagtactgggtcatgacgaagcggcatactccaaaaaccgtcgtgcggtactggtttactaagagaattgcatgagcagtaacttcagacatcaactattgagtctgagcttactggttggtatagcggccccctgggccgcttttgctcaggcaccaatcagtagtgtcggcagtggcagcgtcgaagaccgcgtcactcaacttgagcgtatttctaatgctcacagccagcttttaacccaactccagcaacaactttctgataatcaatccgatattgattccctgcgtggtcagattcaggaaaatcagtatcaactgaatcaggtcgtggagcggcaaaagcagatcctgttgcagatcgacagcctcagcagcggtggtgcagcggcgcaaagtaccagcggcgatcaaagcggtgcggcggcaagtacgacgccgacagctgatgctggtactgcgaatgctggcgcgccggtgaaaagcggtaatgcaaacacggattacaatgcagctattgcgctggtgcaggataaatcccgccaggatgacgcaatggtggcatttcagaatttcatcaaaaattaccctgatagtacttacctgccaaacgccaattattggctgggtcagttaaactacaacaagggtaaaaaagatgatgcggcgtactattttgctagcgtagtgaaaaactatccgaagagtccaaaggctgcagatgcgatgtttaaagtcggcgtcatcatgcaggacaaaggtgacaccgcaaaagcgaaagccgtataccagcaggttatcagtaaataccctggtactgatggcgctaaacaggcacaaaaacgtctgaacgcgatgtaatgcataacacacgaccagaagtcgcattatttctggtcgtgtcgtgcgaatcataagcagttgagtgatctacatcgaaatttttgttgcgctcaagtctgaaatcagtaatatatgccgccgttgccacgggatatcaaacaaaccgaaagcaacgaaaaagtgggtcgttagctcagttggtagagcagttgacttttaatcaattggtcgcaggttcgaatcctgcacgacccaccaatcgctaaggtggaagcggtagtaaaacgtgaaggataacgttgcatgagcaacggcccgaagggcgagacgaagtcgagtcatcctgcacgacccaccactaacatagttagttgtagtatccagcgtagtatcgggtgattagctcagctgggagagcacctcccttacaaggagggggtcggcggttcgatcccgtcatcacccaccaccgggtcgttagctcagttggtagagcagttgacttttaatcaattggtcgcaggttcgaatcctgcacgacccaccagttttaacatcgaagacagatgttaagcgtgtaggataacgttgcgtcagcaacggcccgtagggcgagcgaagcgagtcatcctgcacgacccaccactaatgacggtgggttcggtggaagtagtttgtagtatccagcgcagtatcgggtgattagctcagctgggagagcacctcccttacaaggagggggtcggcggttcgatcccgtcatcacccaccactcgggtcgttagctcagttggtagagcagttgacttttaatcaattggtcgcaggttcgaatcctgcacgacccaccagttttaacatcaaactcagatgttaagcgtgaaggataacgttgcgccagcaacggcccgtagggcgagcgaagcgagtcatcctgcacgacccaccaatcttaaagattggccccgagtaaaaatctttcaggtaacacccgtatgggtcgttagctcagttggtagagcagttgacttttaatcaattggtcgcaggttcgaatcctgcacgacccaccaatttaaaggtggttactggtagagaacgtgaaggataacgttgcgttagcaacggcccgaagggcgagacgaagtcgagtcatcctgcacgacccaccatcctgaatgattaaggcagcataatcccgcaaggggtcgttagctcagttggtagagcagttgacttttaatcaattggtcgcaggttcgaatcctgcacgacccaccaatgtaaaaaagcgccctaaaggcgcttttttgctatctgcgatactcaaagattcgaacctgcagcaggtttgagttgagcgcagcgaaacaacggagccgctcgcggcgacggcccgaagggcgagcgaagcgagtcatcctgcacgacccaccaatgtaaaaaagcgccctaaaggcgcttttttgctattcaggcatcctcaatttcactttgtaaacctgatgacatcgtcagagcttactgtgcaagcaactctatgtcggtggaattaggcgtaaaatgacgcatcctgcacattaggcgtaattcgagtgacttttccccaccattcgactatcttgtttagcatataaaacaaattacaccgataacagcgaatattacgctaatgtcggttttaacgttaagcctgtaaaacgagatggtaagatgagcgtaatgtttgatccagacacggcgatttatcctttccccccgaagccgacgccgttaagcattgatgaaaaagcgtattaccgcgagaagataaaacgtctgctaaaagaacgtaatgcggtgatggttgcccactactataccgatcccgaaattcaacaactggcagaagaaaccggtggctgtatttctgattctctggaaatggcgcgcttcggtgcaaagcatcccgcttctactttgttagtcgctggggtgagatttatgggagaaaccgccaaaattctcagtccggaaaaaacaattctgatgccgacacttcaggctgaatgtagtctggatctcggctgccctgttgaagaatttaacgcattttgcgatgcccatcccgatcgtactgtcgtcgtctacgccaacacttctgctgcggtaaaagcgcgcgcagattgggtggtaactagtagcattgccgtcgaacttattgatcatcttgatagtttgggtgaaaaaatcatctgggcacccgacaaacatctggggcgttacgtgcaaaaacagacgggtggagacattctatgctggcagggtgcctgtattgtgcatgatgaatttaagactcaggcgttaacccgcttgcaagaagaatacccggatgctgccatactggtgcatccagaaagtccacaagctattgtcgatatggcggatgcggtcggttccaccagtcaactgatcgctgctgcgaaaacattgccacatcagaggcttattgtggcaaccgatcggggtattttctacaaaatgcagcaggcggtgccagataaagagttactggaagcaccaaccgcaggtgagggtgcaacctgccgcagctgcgcgcattgtccgtggatggccatgaatggccttcaggccatcgcagaggcattagaacaggaaggaagcaatcacgaggttcatgttgatgaaaggctgcgagagagggcgctggtgccgctcaatcgtatgctggattttgcggctacactacgtggataacgaataataaggcgtaacgttacgctttgggggaaagatggatttttttagtgtgcagaatatcctggtacatataccaataggggcaggcggttatgatctcagttggatcgaagcggtaggcacgatcgccgggttgctgtgtattggccttgccagtctggagaagatcagcaactacttctttggcctgatcaacgtcaccttgtttggcattattttctttcagattcagctgtatgccagcctgctattacaggtgtttttctttgccgcgaatatttacggttggtatgcgtggagccgacaaaccagtcagaacgaggcggagttgaaaattcgctggttgccattgccgaaggcactcagctggttggcggtttgcgttgttagcattggtctgatgacggtatttatcaatccggtgtttgcatttttgacccgcgtggcagtcatgatcatgcaagcattaggattacaggttgtgatgcctgaactgcaaccggacgctttcccgttctgggatagttgcatgatggtgttatctatcgtggcaatgattctgatgacgcgtaagtatgtggaaaactggctgttgtgggtgattattaacgtgattagcgtcgttatttttgcacttcagggcgtttacgccatgtctctggagtacatcatcctgacctttattgcgctcaacggcagccggatgtggatcaacagcgcacgtgaaagaggcagtcgcgcgctgtcccattaatggtgatgatgactatggccagacaccccttcattcaggtggcagtctggcccatgacaaggttgatattccatctgaatggtggcgtgctcaatctgatagtgatccatcaggtagtgttggatctgatccaacaaggcatcgtgatcgtgtggcgggatcacctgcacatgcaacgtcatcaccggcttctcgcctaccatccatacatgtacatggtgcacattgcggacttccgggatttcccggcacatacgacgcttcagttcagcgatatccaggcttaccggtgcaccttcaagtaattcattcacgctatctttcaacagtcgccacgcgctacgcagaaccagaaggctcaccagtatgctgagaatggggtcagcaggtgtccagccagtccagataataatcaacgcggcaataatagccccaacgctacccagcaggtccccgagcacatgcagtgccgctgctcgtacgttgaggtttttctcttcgctgccgtgatgaagtaaccagaaagaaagtatatttgccagcaacccagccacggcaattgccatcatcatgccgccctcgaccggacgcggcgtgcggaagcgttctatcgcctcccagacaatcaaaatggtaattaccacgagggctatggcattcacaaacgccgcgagcgtggtcagtcttagccaaccgaaagtgtggcgaatggtgggaggacgacgactaaattgcacggcgagtagggcgaaaagcagggcggcagtatcggtcaacatatgacccgcatcggccagcaatgccagagaaccagaaagaaaaccaccaacgacttctaccagcataaacccggcagtcacgccgaaagcatacaacaagcgacgagcattattatcttctggcaggtgactggacgtgtgactgtgactgtgcgccatgacgagtcatcccttaattattctcacttaactttatgacatcatactgcttttagaagtgaaaaattaaaagggagagactccgctctcccattattggctattttgcagggttactgcgtggtaccgtcggttttggtatcgacatcattattgatgccatcaccggtttgtacctttttattgatatccggacagcgaccatctttgcacatggtgttcttgtgctcttcatctttggtcattccgtcattgttcatactagaaccatcgctatgcagcattgtgccgccagaaccggtatttaccccgttattgtcgacgttatttggcgcgacattttcacgggcgtcaggggctacctggcccgcatcagctgcggcgtttgcctggccgttattagtttgcgctccgctatcggcagccagtgcggcaccgctggcaaggcttagagtggcagtcagaaataatgtggccagttttgtcattttcataggatgctcctgttatggtcgttatgtcggataacctcttccaacagtgcatttgcaggtgaatataaggcattggtttaagatttcagccaggttatgaaacgcagcagagaatcttgaaataattaacaaacaaaggagttacagttagaaattgtaggagagatctcgtttttcgcgacaatctggcgtttttcttgctaattccaggattaatccgttcatagtgtaaaaccccgtttacacattctgacggaagatatagattggaagtattgcattcactaagataagtatggcaacactggaacagacatgaattatcagaacgacgatttacgcatcaaagaaatcaaagagttacttcctcctgtcgcattgctggaaaaattccccgctactgaaaatgccgcgaatacggttgcccatgcccgaaaagcgatccataagatcctgaaaggtaatgatgatcgcctgttggttgtgattggcccatgcagtattcatgatcctgtcgcggcaaaagagtatgccactcgcttgctggcgctgcgtgaagagctgaaagatgagctggaaatcgtaatgcgcgtctattttgaaaagccgcgtaccacggtgggctggaaagggctgattaacgatccgcatatggataatggcttccagatcaacgacggtctgcgtatagcccgtaaattgctgcttgatattaacgacagcggtctgccagcggcaggtgagtttctcgatatgatcaccccacaatatctcgctgacctgatgagctggggcgcaattggcgcacgtaccaccgaaagccaggtgcaccgcgaactggcaagtgggctttcttgtccggtcggcttcaaaaatggcaccgacggtacgattaaagtggctatcgatgccattaatgccgccggtgcgccgcactgcttcctgtccgtaacgaaatgggggcatagcgcgattgtgaataccagcggtaacggcgattgccatatcattctgcgcggcggtaaagagcctaactacagcgcgaagcacgttgctgaagtgaaagaagggctgaacaaagcaggcctgccagcacaggtgatgatcgatttcagccatgctaacagctccaaacaattcaaaaagcagatggatgtttgtgctgacgtttgccagcagattgccggtggcgaaaaggccattattggcgtgatggtggaaagccatctggtggaaggcaatcagagcctcgagagcggggagccgctggcctacggtaagagcatcaccgatgcctgcatcggctgggaagataccgatgctctgttacgtcaactggcgaatgcagtaaaagcgcgtcgcgggtaaggtttaattgtcggatgcgccgtcagagtggcgtatccgatgaatcaccacaggcctgataagtcgcgcagcgtcgcatcaggcaatgtgctccattgttagcaacaaaaaagccgactcacttgcagtcggctttctcattttaaacgaatgacgtttacttcgctttaccctggtttgcaaccgccgctgctttcgctgcgatctcgtcagcattacccagataatagcgtttcagcggtttgaaattctcgtcgaactcatacaccagcggcacgccagtcgggatattaagctcaagaatctcttcttcgctcatgttatcaagatatttcaccagcgcacgtaaagagttaccgtgtgcagcgatgatcacgcgctcaccgctcttcatacgcggcagaatagtttcattccagtaagggatcacgcggtcaatggtcagcgccaggctttccgtcagcggcagttctttctcgctcagtttcgcgtaacgcggatcgtgacccggataacgctcatcatctttagtcagttccggcggagtcactgcaaaaccacgacgccactgtttcacctgctcgtcgccatacttttcagcagtttccgctttgttcagaccctgcaacgcaccgtagtgacgttcgttcagtttccaggatttctcaacgggcagccatgcctgatccagttcgtccagcacattccacagggtatggatagcgcgtttcagcacagaagtgtaagcaaagtcaaagctgtaaccttcctctttcagcagcttacctgctgcttttgcttcgcttacgcctttctcagacagatccacgtcgtaccaaccggtgaaacggttttctttgttccactgactttcgccatgacgaaccagaaccagcttagttacagccatatacttactcctcaaatcatcttttaatgataataattctcattatattgccgcgacgaagcaacagcaatgcttacgcataaccatagcgaaaatagtggcgcagtgtaaggttgttgtgaatattgagttgcaaatatgtcggtgtttgctggtgatttgaacaatatgagataaagccctcatgacgagggcgtaacattactcagcaataaactgatattccgtcaggctggaatactcttcgccaggacgcaggaagcagtccggttgcggccattcagggtggttcgggctgtccggtagaaactcgctttccagagccagcccttgccagtcggcgtaaggttcggttccccggctcggtgtgccgccgaggaagttgccggagtagaattgcagagccggagcggtggtgtagaccttcagctgcaatttttcatctgcactccagacatgcgccgccactttcttgccatcgcctttggcctgtaacaagaatgcgtgatcgtaacctttcactttgcgctgatcgtcgtcggcaagaaactcactggcgatgattttggcgctgcggaaatcaaaagacgttccggcgacagatttcaggccgtcgtgcggaatgccgccttcatcaaccggcagatattcgtccgccagaatctgcaacttgtgattgcgcacgtcagactgctcgccgtcaagattgaaatagacgtgattagtcatattcaccgggcaaggtttatcaactgtggcgcgataagtaatggagatacggttatcgtcggtcagacgatattgcaccgtcgcgccgagattacccgggaagccctgatcaccatcatcactactcagggcaaacagcacctgacgatcgttctggttcacaatctgccagcgacgtttgtcgaacccttccggcccgccgtgcagctggttaacgccctgacttgggctaagcgtcacggtttcaccgtcaaaggtataacggctattggcgatacggttggcataacgaccaatagaggcccccagaaacgcggcctgatcctgatagcattccgggctggcacagccgagcagcgcctcgcggacgctgccatcggaaagcggaatacgggcggaaagtaaagtcgcaccccagtccatcagcgtgactaccatccctgcgttgttacgcaaagttaacagtcggtacggctgaccatcgggtgccagtgcgggagtttcgttcagcactgtcctgctccttgacttggtttacaaacgtaaaaagtctctttaatacctgtttttgcttcatattgttcagcgacagcttgctgtacggcaggcaccagctcttccgggatcagcgcgacgatacagccgccaaatccgccgccggtcatgcgtacgccacctttgtcgccaatcacagctttgacgatttctaccagagtgtcaatttgcggcacggtgatttcgaaatcatcgcgcatagaggcatgagactccgccatcaactcgcccatacgtttcaggtcgccttgctccagcgcgctggcagcttcaacggtgcgggcgttttcagtcagtatatgacgcacgcgttttgccacgatcgggtccagttcatgcgcaacagcgttgaactcttcaatggtgacatcacgcagggctggctgctggaagaaacgcgcaccggtttcgcactgttcacgacgggtgttgtattcgctgccaaccagggtacgtttgaagttactgttgatgatgacgacagccacacctttgggcatggaaactgctttggtccccagactgcggcaatcgatcagcaaggcatgatctttcttgccgagcgcggaaattagctgatccatgatcccgcagttacagcctacaaactggttttctgcttcctgaccgttaagcgcgatttgtgcgccgtccagcggcagatgataaagctgctgcaatacggttccgaccgcgacttccagactagcggaagaacttaacccggcaccctgcggcacattgccgctgatcaccatgtccacgccgccgaagctgttgttacgcagttgcagatgtttcaccacgccacgaacgtagttagcccattgatagttttcatgtgcgacaatgggcgcatcgagggaaaactcgtcgagctgattttcataatcggctgccatcacgcgaactttacggtcatcgcgtggtgcacaactgatcacggtttgataatcaatcgcgcagggcagaacgaaaccgtcgttgtagtcggtgtgttcaccaatcaaattcacgcggccaggcgcctgaatggtgtgagtggcagggtagccaaatgcgttggcaaacagagattgtgttttttctttcagactcatttcttacactccggattcgcgaaaatggatatcgctgactgcgcgcaaacgctctgctgcctgttctgcggtcaggtctcgctgggtctctgccagcatttcataaccaaccataaatttacgtacggtggcggagcgcagcagaggcggataaaagtgcgcgtgcagctgccagtgttgattctcttcgccattaaatggcgcgccgtgccagcccatagagtaggggaaggagcactggaagaggttgtcataacgactggtcagctttttcaacgccagcgccagatcgctgcgctgggcgtcggtcaaatcggtgatccgtaaaacgtgggctttgggcagcagtagcgtttcgaacggccaggcagcccagtaaggcacgacggctaaccagtgttcggtttcgacaacggtacggctaccgtctgccagctcgcgctgaacataatccaccagcattggacttttctgttcggcaaaatattctttttgcaggcggtcttcgcgctcagcttcgttaggcaggaagctatttgcccaaatctgaccgtgcggatgcgggttagagcagcccatcgccgcgcctttgttttcaaaaacctgcacccatgggtacgttttccccagttctgcggtttgctcctgccaggttttgacgatttccgtcaatgctgcaacgctgagctctggcagcgttttactgtgatccggactaaagcagatcacccggctggtgccgcgcgcgctctggcaacgcatcagcggatcgtgactttctggcgcatctggcgtgtcagacatcaaagccgcaaagtcattagtgaaaacgtaagtcccggtgtaatcggggtttttatcgcctgtcacccgcacattacctgcgcagaggaagcaatctggatcgtgcgcaggtaacacctgtttggctggcgtttcctgcgccccctgccaggggcgcttagcgcggtgcggactaaccagaatccattgcccggtgagcgggttgtagcggcgatgtggatgatcaacgggattaaattgcgtcatggtcgttccttaatcgggatatccctgtggatggcgactctgccagtgccaggtgtcctgcgccatttcatcgagtgtgcgcgttacgcgccagttcagttcacggtcggctttgctggcgtccgcccagtaggccggaaggtcgccctcgcgacgcggtgcaaaatgataattaaccggtttgccgcaggctttgctgaaggcattaaccacgtccagcacgctgttgcctacgccagcgccgaggttgtagatgtgtacgcctggcttgttcgccagtttttccatcgccacgacgtgaccgtccgccagatccattacgtggatgtaatcgcgtacgccagtaccatcttcggtcggataatcgttaccaaaaatcgccaggctgtcgcgacggcctacagcaacctgggcgatgtatggcatcaggttattcggaatgccttgcggatcttcgcccatatcgccgctcggatgcgcgccaaccgggttgaagtagcgcagcagggcaatgctccagtccggctgggctttttgcagatcggtgaggatctgttccaccatcagcttgcttttgccgtaagggctttgcggtgtgccggtcgggaagctttcaacgtatggaattttgggctgatcgccataaacggtggcggaggagctaaaaataaagtttttgacgttagcggcgcgcatggcgctaatcaggcgcagagtgccgttgacattgttgtcgtaatattccagcggtttttgtacgctttcgcccacggctttcagcccggcgaagtggatcacggtgtcgatagcgtgatcgtgcaggatctcggtcatcaacgcttcgttacgaatatcgccttcaacaaacgttggatgtttgccgcctaaacgctcgataacaggcagtacgatgcgcttactgttacagaggttatcaagaatgatgacatcatgaccgttttgcagtaattgcacacaggtatgacttccaatgtaaccgctaccaccggtaaccagaactctcataattcgctccattaggcttatggtatgaaataaccatagcataacaaagatgcgaaaagtgtgacatggaataaattagtggaatcgtttacacaagaatttagccgttttttatgcgcgattaagtgattataaaacagagggtttatgaatgattgcgctttttatctgaaaaaagacgcggtttcatgcctgcatgcgtcgaaccgttggccggagagggtgctaaggccgcctccggcaaggtcagcactaccgactcaatatatttttgtcagcacatagcgatagagtccaccgtccggcacgaactcaagacgatgggtaatacaggcaggcgcatcttcagcgtggtggctaacaaacaacaattgcgtttcaccttcgctaatcagcacatcaacaaaacggcggataagctggcgattcagcggatcaagcccctgtagtggttcatcgagaataagcaacgtcggatgtttcaccagtgcgcggacaatcagcgccagacgctgctgtccccaggaaagactatggaacggagcgtcagccgtgcgtttatcaatgccgagaatatccagccactgctgcaccagtttttgctggcgatcgctaacggcctgataaatgccaatgctatcaaaatagccagaaagaatcacattacgcacggtagtgctgacccggtaatccagatgcaaactactgctgacgtaaccgatatgctttttgatatcccagatggtttcgccgctgccgcgacgtcgtccgaaaagcgtcaaatcgttgctgtaaccttgcggatgatcgccagtaaccaggcttaataacgtgctttttcctgcaccatttggcccgacaatttgccagtgttcgcctggattcacctgccagctaaggttattaagaatggggcgatcgttataagaaaccacgccattgttcagcacaatgcgcggttcgttggcgggtaaggcgtgacgtgcactaggttcatccggctccggcagttgcacaccttcaagctgttcactatgcgccagttgcgcgacgagtgcttgttggagcagttcctctttagcgccagtttccgctaacgtgcaatccgccagcacgccagcaaactggacaaactccgggatctcatcgaagcgattgagcaccagtaccagagtaataccggactgatgtaagctggcgagtcgctcagccagctgctgacgactggcaacatccaggccatcgaacggctcatcaagaatcaacaagtcaggctcgctcatcagcgcctgacacagcagggtttttcgcgtctcgccagtggaaaggtatttaaagcgtcggtcgaggagggcggtaataccgaactgctgcgccagttgcatgcaacgcggtgcatcctttacttcatcctgaatgatctcagccgtagtgcgtccggtgtcatcttcgccagggccgagcatatcggtgttattccgctgccattcgtcgctgacgagtttttgcaattgctcgaaggagagacgagtgatgtgggaaaactggctttgccgttcacctttcaaaagcggaagttcccccgccagcgcgcgggccagggcgcttttcccgcttccattgctaccgacaaacgcccaactatcacccgcgtttaacgttagctgaggcaattgcagcgtttttgtgtcgctaagacgaaacgtgccttgcaaaatttgcaagctactcattttatatcccactttgtgcagcgattactgacagggatacgtgtttcataacaaattgtcaacacgcttagcacagcgtggcgataatcacgctgtcggcattaaagtaggccgtgacattctgtccttgctgaagagaagtcgcttcatttaccggcactgtggcgcacagtgtttgcccgtcgggtagcgccattaatacttcgcactgctctgcgccgcgctcaatatgactaataatacccggtaattggttgtcagcgttttgcgcgaccgcctcgtcctgagtaatacctacccacggcgcttttagcaatatcaacacttctttgccttcatccagccccagacgcgcgccgctttgtgcggtaattgcgactttcaggcgtgtttttccgtcagccagtaagacatcaacatgctgttgaacgtcatcatgatcgcgggcggtgatggtaccgaaccactggttacgggcgctggtttgcagactaaaacgactgatcgcggccagcaggctgttcagcggcagggcgtcatcgtcacttaacacatcaaaggctttttgctggatttgcgccagtaagtcatagagctgaatcagtcgctgaccatagcgggtcagtactgcgccgccgccacctttaccgcctgttgcgcgctcgaccagaatatgctcacttaactgattcatctcgttaatggcatcccaggcgcttttatagctaataccggcatctttcgctccctggctaatggaaccggaaagcgcaatgtgttttagtaggctaatgcggcgcgggtcggcgaataatttttgttggagcttaagggtgagaaggatttcggcctgcataacaatgtcctggcaaaagtcttattgtgacggaaaacgaacgccacgcaaagctgaccgcacaaaaggggagtgcttttctgtgcttagcggttagaatagtctcatgactatatctggagttgaccatgttagagttattaaaaagtctggtattcgccgtaatcatggtacctgtcgtgatggccatcatcctgggtctgatttacggtcttggtgaagtattcaacatcttttctggtgttggtaaaaaagaccagcccggacaaaatcattgattccctgaatgcccgcttagtcgggcattttctttttctcaacttcctgcttttcctgccgatattttttcttatctacctcacaaaggttagcaataactgctgggaaaattccgagttagtcgttatattgtcgcctacataacgttacattaaggggttaccaatggctcgtaaatggttgaacttgtttgccggggcggcactctctttcgctgttgctggcaatgcactggcagatgaagggaaaatcacggtgttcgccgccgcaagtctgactaacgcaatgcaggacattgctacgcagtttaaaaaagagaaaggcgtggatgtggtttcttctttcgctagcagttctactctcgcccgtcagattgaagcgggtgcgcctgcggatctgtttatttctgccgatcagaaatggatggattatgcggttgataaaaaagcgatcgatacagctacgcgtcagacactgctcggcaatagcctggtcgttgtagcaccgaaagccagcgtgcagaaagatttcaccatcgacagcaaaaccaactggactagtctgctgaatggcggtcgcctggcggttggcgatccggaacatgttcccgctggcatttatgcaaaagaagcactgcaaaaactgggcgcatgggatacgctctctccgaaactggccccagcggaagatgttcgtggggcgctggcgctggtcgaacgtaacgaagcgcctctgggcattgtctacggttctgacgcagttgccagcaaaggggtaaaagtggttgccaccttcccggaagatagtcataaaaaagtggaatatccggttgctgttgtggaagggcataacaatgcgacagtgaaagcattttatgattatctgaagggaccgcaggcagcggaaatctttaaacgttacggatttacaatcaagtaatgatactgaccgatccagaatggcaggcagttttattaagcctgaaagtttcttccctggctgtgctgtttagcctgccgtttgggatcttttttgcctggttactggtgcgttgcacgtttccgggcaaagctctgctcgacagcgtactgcatctaccgctggtgttaccgcccgtggtcgtcggttacttattattagttagcatgggacggcgcggatttatcggtgaacgtctgtatgactggtttggtattaccttcgcctttagctggcgcggcgcggttctcgctgccgccgtcatgagctttccgctgatggtgcgggcaattcgtctggcgctggaaggggttgatgtcaaactggaacaggccgcaagaacactgggggccgggcgctggcgcgttttctttactatcacgttaccgctgaccttaccgggaattattgttggtacggtactggcttttgctcgttctctcggtgagtttggtgcaaccatcacctttgtgagcaacattcctggtgaaacgcgaaccattccttctgccatgtataccctgatccagacccccggcggggaaagtggagcggcgagactgtgcattatttctattgcgctggcgatgatctccctgttgattagtgaatggctggccagaatcagccgtgaacgggcggggcgctaatcatgctggaactgaatttttcccagacgttgggcaaccattgcctgactattaatgaaacgctgcccgccaatggcatcactgctatctttggcgtctccggtgccggaaaaactagcctgattaacgccatcagtggactgacgcgcccgcaaaaagggcggattgtcctcaatgggcgggtactaaatgatgccgaaaaaggtatctgcctgacgccggaaaagcgtcgcgttggctatgtttttcaggatgcgcggctgttcccgcattacaaagtgcgtggcaatctgcgctacggcatgagcaaaagtatggtcgatcagttcgataagctggtggcgcttttaggcattgaaccgttgcttgaccgtttaccaggcagcctgtccggaggcgaaaaacagcgcgtggcgattggtcgggctttgctgacagcaccggaattgctgttgctggatgaaccgctggcgagtctggatattccgcgtaaacgcgaactgttgccttatctgcaacggctgacacgggaaatcaacattccgatgttgtatgtcagccatagcctggatgagatcctccatctggcagacagagtgatggtactggaaaacggtcaggtgaaagcctttggcgcgctggaggaagtgtggggcagtagcgtgatgaatccgtggctgccgaaagagcaacaaagtagcattctgaaagtgacggtgcttgagcatcatccgcattacgcgatgaccgcgctggcgctgggcgatcagcatttgtgggtcaataagctggacgaaccgctgcaagctgcgctacgtatccgcattcaggcttccgatgtttctctggttttacaaccgccgcagcaaaccagcattcgtaacgtattgcgggcaaaagttgttaatagttatgacgacaacggccaggtggaagtggaactggaagtcggcggtaaaacgctgtgggcgcgtatcagcccgtgggccagggatgaactggcgatcaaacctggcctgtggctgtacgcgcaaattaaaagtgtgagcataaccgcctgattaaatcaggtggctataaatgaactgggcaatgctgtcggtggtgttatcaccaatcacaatgttggcgcgcgcttttaccgcgtcatcggcgttgcccatcgccacgcctgtaccagcggcttccagcatactgatatcattaaagttatcgccgaatgccacgacgttttccatgctccaaccttgcgcctcaacccatttcgtcaaacgtttacctttgctgttgccgccgcgtgcaatatcaacctgatcgtgccaggaccattcacactccagtcccagttcatgttcgacatgcttaccaaaatgctgcaattgcggcaggtcatcgtgcgtcagggcgaacttccatacggcgttaacttgttgcgccgtttcagccagagaagcgacttgtgtgaaagtcggacgctgttccggcggcagggtttgcgcccagttagatgtgcgaatgacatgcccggtcgggtgctcatagaccattgcatcatcgacatacatcagaccgtgaatgtggtgttcattcagcatctcaatgagttgcagggctttaataacgggcattgggtccgcttccagcacggtttttgcatgataatcatacaaataggtgccattacagcaaatagcaggtgtatccagcgccagcgcctgataaaaaggatgaatagcgacgtgatggcgacctgtgacgatgattaattgatagcctgcttcgcgagcgcgggccagggcttctatgctactaggaagcagggtctttttcggggtcaataaggtgccgtctaagtcgagagcaatcacgcgtgtggtcatggcgtattccagattaaggttaagaattttcgtctgcgcgaatggtacaccgataccactatcggacaaaattctgcgttttaattcagcattcaccgccaaaagcgactaattttagctgttacagtcagttgctaaatgcaaaggagcattcatgaagcaaacagtttatatcgccagccctgagagccagcaaattcacgtctggaatctgaatcatgaaggcgcactgacgctgacacaggttgtcgatgtgccggggcaggtgcagccgatggtggtcagcccggacaaacgttatctctatgttggtgttcgccctgagtttcgcgtcctggcgtatcgtatcgccccggacgatggcgcactgacctttgccgcagagtctgcgctgccgggtagtccgacgcatatttccaccgatcaccaggggcagtttgtctttgtaggttcttacaatgcgggtaacgtgagcgtaacgcgtctggaagatggcctgccagtgggcgtcgtcgatgtggtcgaggggctggacggttgccattccgccaatatcagtccggacaaccgtacgctgtgggttccggcattaaagcaggatcgcatttgcctgtttacggtcagcgatgatggtcatctcgtggcgcaggaccctgcggaagtgaccaccgttgaaggggccggcccgcgtcatatggtattccatccaaacgaacaatatgcgtattgcgtcaatgagttaaacagcagtgtggatgtctgggaactgaaagatccgcacggtaatatcgaatgtgtccagacgctggatatgatgccggaaaacttctccgacacccgttgggcggctgatattcatatcaccccggatggtcgccatttatacgcctgcgaccgtaccgccagcctgattaccgttttcagcgttagcgaagatggcagcgtgttgagtaaagaaggcttccagccaacggaaacccagccgcgcggcttcaatgttgatcacagcggcaagtatctgattgccgccgggcaaaaatctcaccacatcagcgtatacgaaattgttggcgagcaggggctactgcatgaaaaaggccgctatgcggtcgggcagggaccaatgtgggtggtggttaacgcacactaaccgctgatttacccggcgcagtctctcctgcgccggtgtattaacctatctcctgtaacgcgtgtctctggcgttcgacgatattggtccacaaattgtctttatcgtcagtccataaattaatcagcaaggcaaaaaagcgttctgctgctggagaaagtacggcatctttacggcgaattattcccaatgttcgacgtataacgggttccaccaatgggataccaataatgctagaatagggcgcatgaggcattgccaggccaggaagcgcgctaatccccagtcccgcctccaccagtcctaaactcgtgctaagatgacgcacttcgtaaaaccagtccagcttccagggcttgtcggccagctgttgttctatcaacagtcggttgccgctggaggagcgtacgccaatcattttgtaacccactaactcctgccattctacaagctgctttttggccaatggatggtcacgccgacaggccagcacgaacggctcgttgaccagtggggtaaaatcaatggaactatttgtgacgttgttcatgtttatgccaaagtcactttcgttacacagcacgctttccatgcaattattcgtgccttgttccagaatccgcactttaatattgggatacagctcattaaatttaccgattgccagcggtaaaaaataaaatactgcggtcggaatacacgctaacgtcaccataccacgatgataagcattcatatcacgaatattaaaaagcgtttcatcgaatttctttattaattcccgcgcctccgggagcaacctttttcctgcttttgttaacgtaaccttgcgagttgtacgctcaaatagttgaacatgtaaatcttcctccatcttttttattcttcgcgttaatgcaggttgcgtaatattgagtaatttagcggcattgttaaagctactggactctgccagtatgacaaatgccttcatactacttaattcatgcttcattattactccggaaaatggaaggctgctttttgggtggctggccgttaaaaattttaactgcatttagccaacttaaattaatgaaaaaatgttattaatcgttgagctaaagtcattagagatgctttgcccttaatgtaaccatatcgcaataagttatgtttttaaattgagggcattattatgaaaaaaataccctgcgtgatgatgcgaggtggaaccagcaggggcgcgttcctgttagcggaacatttacccgaagatcaaacgcagcgcgataaaatattgatggcaattatgggttccggtaacgatctggaaattgacggtattggcggcggtaatccactgaccagtaaagtcgccattattagccgttccagcgatccgcgtgctgatgtcgattatctgtttgcgcaggtaatcgttcatgagcaacgtgtcgataccacgcctaactgcggcaatatgctgtctggtgttggggcattcgccattgaaaatggtttgattgcagcgactagcccagttactcgcgtacgtatccgcaacgtcaatacgggtacgttcatcgaagctgatgtgcaaacgccaaatggtgttgtcgagtacgagggtagcgccagaattgacggcgtaccgggtactgccgcaccggttgcgctcactttcctgaatgccgctggaaccaaaaccggaaaagttttcccgactgataatcagattgattattttgacgatgtcccggtgacctgtatcgatatggcgatgccagtcgtcattattccggctgaatatctgggaaaaacaggttatgaattaccggcggaactggatgccgacaaagcattattagcccgcattgaatctatccgtctacaagcgggtaaagcaatgggcttaggtgatgtcagtaatatggttatccctaaacctgtgcttatttctccagcgcagaaaggcggggcaattaatgtgcgttattttatgccgcattcttgccatcgcgcgctggcgataaccggtgctattgctatttccagtagttgtgcattggaaggcaccgtcacccgacaaatcgtcccttctgtaggatacggcaatatcaatattgaacaccccagtggtgcgctcgacgttcatttaagtaatgaaggtcaggatgccacgacgttacgcgcatctgttattcggacgaccagaaaaatattttccggtgaagtttatcttccctgaaaaaattcgttgtcaggataaggacaatcaataaaggacttctgtatgagtcatacagaaagaacaggattttaaatgaataagaaaagcttatggaagctaattctgatattagcgatcccatgtattattggttttatgccagctccggcaggattaagcgaactggcgtgggtgctttttggtatttacctggcggccattgtggggctggttatcaagcctttcccggaacctgtcgtactgttaattgccgttgctgccagtatggtggtggtcggtaacttatccgacggtgcgtttaaaaccaccgccgtattaagcggttactctagtggtaccacctggctggtgttcagcgcgtttaccttaagcgccgcatttgtgaccaccggtttaggtaaacgtattgcctatctgctgattggtaaaatcggtaacaccacgctgggtctgggttacgttacggtattcctcgatctggtactggctccggcaacaccgtctaacaccgcgcgtgcgggcggcattgtgttaccgatcatcaacagcgtggcggtggctttggggtccgaaccggaaaaaagtccgcgtcgtgtcggacattacctgatgatgtccatttacatggtcaccaaaaccaccagctatatgttctttaccgcaatggcggggaacattctggcgctgaaaatgatcaacgacattctgcacctgcaaattagctggggtggatgggcgctggcagccggattgccgggcatcattatgctgctggtcaccccgctggtgatttacaccatgtatccaccagaaattaagaaggtggataacaaaaccatcgctaaagcgggccttgccgaactaggaccgatgaaaatccgcgaaaaaatgctgctcggtgtctttgtgctggcgctgctgggctggattttcagtaagtctctgggggttgatgaatccaccgtggcaatcgttgttatggcaaccatgctgctgctgggtatcgttacctgggaagacgtggttaaaaataaaggcggctggaataccttaatctggtacggcggtattatcggcttaagctccttattaagcaaagttaaattcttcgaatggttagctgaagtctttaaaaataacctggcatttgatggtcacggtaacgttgctttcttcgttattattttcctcagcattatcgtgcgttatttcttcgcttccggtagtgcctatatcgttgctatgttaccggtatttgccatgctggcgaacgtctccggcgcaccgttaatgttaaccgcgctggcactgttgttctccaactcctatggcggcatggttactcactatggcggcgcggcaggtccggtcatctttggcgtgggttataacgatattaaatcctggtggttggtcggtgcggtactgacgatattaaccttcctggtgcatatcaccctcggcgtgtggtggtggaatatgctgatcggctggaacatgctgtaaatattctcgtcatacttcaagttgcatgtgctgcgtctgcgttcgctcaccccagtcacttacttatgtaagctcctggggattcactcgcttgtcgccttcctgcaactcgaattatttagagtatatccatttattatctttctgcgcacttcacggtgcgcagatatctggagcatttgatgatcaagttatctgaaaaaggcgtgtttctcgccagtaataacgaaataattgccgaagaacatttcaccggcgaaattaaaaaagaagaagccaaaaaaggcactattgcctggtctattctctctagccataatacgtccggaaatatggataaacttaaaattaagtttgatagtttagcctctcacgatattacctttgttggtattgtacagaccgctaaagcgtccggtatggaacgtttcccgctgccgtatgtgctgaccaactgccataacagtctctgcgccgtcggcggcactattaacggtgatgaccatgtttttggtttaagcgcggcccagcgttatggcggtatttttgtgcctccgcatattgcggtcatccatcaatatatgcgtgagatgatggcaggcggcggcaaaatgatcctcgggagtgacagccacacccgttacggtgcattagggacaatggcagtcggtgagggcggcggtgagttggtaaaacagctgcttaatgacacctgggatatcgactatccgggcgtggttgcggtgcatctgaccggaaaacctgcgccgtatgtggggccacaggatgtggcgctggctatcattggcgcggtgttcaaaaacggttacgtcaaaaacaaagtcatggagttcgttggaccgggcgttagcgcgctctctaccgatttccgtaacagcgttgacgtgatgaccactgaaacgacctgtttaagttctgtctggcaaaccgatgaagaagtccataactggctggcgctgcacggtcgcggccaggattactgccagcttaaccctcaaccgatggcgtactacgatggctgcatcagcgttgatttaagcgccatcaaaccaatgattgcgctgccgttccacccgagcaacgtgtatgaaatcgacacactgaaccagaacctgaccgacattctgcgtgagattgaaattgagtccgaacgcgtggcgcacggtaaagccaaactcagcctgctggataaagtggaaaatggtcgcctgaaagtgcagcaggggattatcgcgggctgttctggcggtaactacgaaaacgtcatcgcggcggcgaatgcactgcgcggtcaatcctgtggcaatgacaccttcagcctggcagtttacccgagtagtcagccggtgtttatggatctcgccaaaaaaggtgtggtagcagatttgattggcgcaggcgcaatcatcagaaccgcgttctgcggcccatgctttggcgcgggcgatacgccaatcaacaacggtttgagtattcgccacaccacgcgtaacttcccgaaccgcgaaggctctaagccagctaatgggcagatgagtgcggtggcgttgatggacgctcgttctatcgctgcgactgcggcaaacggtggctatttaacctctgccagcgaacttgattgctgggacaacgtgccggagtacgccttcgatgtaacgccgtataaaaaccgtgtttatcagggctttgtgaaaggggcaactcagcaaccgctgatttacgggccgaacattaaagactggccggaattgggtgcgctgactgacaatatcgtcctgaaagtgtgcagcaagatcctcgacgaagtgaccaccaccgacgaactgattccttccggtgaaacctcttcttatcgtagtaatccgattggtctggcggagtttaccctgtctcgccgcgatcccggttatgttagcagaagtaaagcgactgctgagctggaaaatcagcgtctggcggggaatgtcagcgagctgacagaggtgtttgcgcgcattaagcagattgctggtcaggagcatattgatccgctgcaaactgaaattggcagcatggtctatgcggtgaaaccaggcgatggttctgcgcgtgaacaggcggcgagctgccagcgtgtgattggcggtctggcgaatattgccgaggagtacgcgactaaacgctatcgttctaacgtcatcaactgggggatgttaccgctgcaaatggcggaagtaccaacctttgaagtgggggattacatttacatccctggcattaaagcggcgctggataatccgggtacgacgtttaaaggttatgtgatccatgaagatgcgccggtaacggaaattacgctctatatggaaagtctgactgctgaagagcgcgagattatcaaggcgggtagtttgattaacttcaataaaaaccgtcagatgtaaaaagcgccatgtgaatgtaggtcgcattcggcacttattgtcggatgcgatgcttgcgcatcttatccgacctacgaatcgcatcgaatctgtaggccagataaggcattttcgcagcatccggcacttattgtcggatgcgatgcttgcgcatcttatccgacctacaaatcgcatcgaaccgtaggccggataaggcgtttacgccgcatccggcaaatagttaattgcccttacttcttcgcctctgcaaccactttactacccacgccgcggttattgtattcccacatgcggttgtagttagtgtcattcagattgcgctgtatttcgtcgttatcatctacgctgccggtattacccgcaaacggacgattagagatcaccgcatcggcccacggtttagccgtgttaaaaccttcgttgatggcgctatcacggatcaccacctgaccgttggtattggcatcaacatccaggctgcggcccagttgcgccacaccatcaccgaaagcattgaaacggctgtttacggcgaggaaaccgtagtaaatgttggacagcgtagccggtgcaaacacatacgcttcttgctgagtacgactgttcaccacgcggaattcggtgttatcgaacaccactgcgccgcgaccagaaacgatatccacatccccttcaatgtagctgttggtcaccagcgtacgcggctgacgattcgtttccagacggttctgcacaccgctgttggtgacaaagaaggtgttctgacgaccgagaatgttaacgttgttaatctgtacctggtcaccatcagtacgcagtgccaccgccggatggttacctgcatctacgctatcgcccagcgtgttttcgatggtcagattttgcagttgcaggccattgttttgactccagaagaccgcagagcagagaacaccgatactgtcgctgcgtttgctctggcagctatcgtacatataccacgctggtttacctggcatatatttgccgcgcgggttgacgtcgtgacgccagtcggcagggctcatgccaccatcaagggaaagcccaatcttcacatcaatcggtttttcacctgtaccgtacagagtaattccacccggagcggcagggacatataccgttccctgatactcaccaggcatcacggcaatatactggcgcttgttggtacgcttgataattgccgcatctaccgccgcctgaatcgtggtatgcgttacaccttgagtgcccgccgggccgacaacaaagtcaggttgcgcaggcagggtaatcggggaaggattccacgctgcagcacctggtgtcagggatgcaaaatagtgttgagcatcgaaattctgcgcttcttttgcgctcagaatcgggcgagaagaggtaccaggcgcggtttgatcagaaggacgttgatcgggcggggtactgctacaggcggtcagcgtcacgccaaaagccaatgccagcgccagacgggaaacactaaatgtgttcacaggttgctccgggctatgaaatagaaaaatgaatccgttgaagcctgcttttttatactaacttgagcgaaacgggaaggtaaaaagacaaaaagttgtttttaatacctttaagtgataccagatggcattgcgccatctggcagagtgattaactaaacatcgcagtaatgctggcgcttgccagagagtggaaatgaacgttaaacccgaccatcgcgccgctggcaccttcatcgacatcaatacgttctatatccagcgcgtgaacggtaaaaatgtagcgatgagtttcgcctttcggcggtgctgcgccatcgtacccggttttaccaaagtcggtacgcgtctgcaaaacgccgtctggcattgctaccagaccagagccaaacccttgcggtaatacgcgggtatcagcgggtaagttaacaactacccagtgccaccagccggagccggttggcgcatccgggtcgtagcaggtgacaacaaaacttttcgttcccgcaggaacatcatcccacgccagatgcggactaatattatcgccatcgtaacccatgccgttaaagacatgacgatgcggcaatttatcgccatcgcgcagatcgttactgatgagtttcatgaaccctcctttcttgtttgcagaaagtgtagccagaaaccctcacgcggacttctcgttattggcaaaaaaatgtttcatcctgtaccgcgcggttaaccgctgcggtcagacgctgcaactgttgcgggagaataatatagggcggcatcaggtaaatcagtttgccaaaaggccggatccagacaccctgttcgacaaagaatttttgcagcgccgccatattcaccggatgagtggtttcgaccacgccaatggcccccagtacgcgcacatcggcaaccatttcggcatcacgggcgggggcaagttgctcgcgcagctgtacttcaatatccgccacctgttgctgccagtcgccagattcgagaatcgccaggctggcgtttgctgccgcgcaggccagcggattgcccataaaagttggcccatgcataaagcaaccggcttcaccgttactgatggtttctgcaacctcgcgcgtggtgagtgtggcggaaagggtcattgtgccgccggttaaggctttaccgaggcacaaaatgtccggcgcgatttctgcatgttcacaggcaaacagtttcccggtacgaccaaatccagtggcgatctcgtcggcaatcagcaagataccttcgcgatcgcatattttgcggattcgttttaaccattccggatggtacatgcgcatcccgcctgcgccctggacaatcggctcaatgatcaccgccgcgatttcatgacgatgcgccgccatcaggcgggcaaagcccaccatatcgcgctcatcccattcgccatccatgcggctttgcggggcgggagcaaacaggttttctggcaggtagcctttccacagactgtgcatactgttatccggatcgcacacgctcatcgcgccaaaggtatcgccatgataaccattgcggaaggtcagaaaacgctggcgcgcttcgcctttggcttgccagtactgcaacgccattttcatcgccacttccaccgctacggaaccggagtccgcgagaaaaacgcactccagcggttgcggcgtcatcgccaccagtttgcggcacagctcaatggctggcgcatgggtgataccgccaaacatcacatggctcatggcatcaatttggctcttcatcgccgcattaagctgcgggtgattgtagccgtggatcgccgcccaccaggagctcataccgtcaaccaggcgtctgccgtcagacaaaatcagctcgcaaccttcggcgctcaccaccggataaaccggcagaggggaggtcatggatgtgtatgggtgccagatatggcgttggtcaaaggcaagatcgtccgttgtcataatcgacttgtaaaccaaattgaaaagatttaggtttacaagtctacaccgaattaacaacaaaaaacacgttttggagaagccccatggctcaccgcccacgctggacattgagccaagtcacagaattatttgaaaaaccgttgctggatctgctgtttgaagcgcagcaggtgcatcgccagcatttcgatcctcgtcaggtgcaggtcagcacgttgctgagcattaagaccggagcttgtccggaagattgcaaatactgcccgcaaagcagccgctacaaaaccgggctggaagccgagcggttgatggaagttgaacaggtgctggagagcgcgcgcaaagcgaaagcggcaggaagcacgcgcttctgtatgggcgcggcgtggaagaatccccacgaacgcgatatgccgtacctggaacaaatggtgcagggggtaaaagcgatggggctggaggcgtgtatgacgctgggcacgttgagtgaatctcaggcgcagcgcctcgcgaacgccgggctggattactacaaccacaacctggacaccagcccggagttttacggcaatatcatcaccacacgcacttatcaggaacgcctcgatacgctggaaaaagtgcgcgatgccgggatcaaagtctgttctggcggcattgtgggcttaggcgaaacggtaaaagatcgcgccggattattgctgcaactggcaaacctgccgacgccgccggaaagcgtgccaatcaacatgctggtgaaggtgaaaggcacgccgcttgccgataacgatgatgtcgatgcctttgattttattcgcaccattgcggtcgcgcggatcatgatgccaacctcttacgtgcgcctttctgccggacgcgagcagatgaacgaacagactcaggcgatgtgctttatggcaggcgcaaacagcattttctacggttgcaaactgctgaccacgccgaatccggaagaagataaagacctgcaactgttccgcaaactggggctaaatccgcagcaaactgccgtgctggcaggggataacgaacaacagcaacgtcttgaacaggcgctgatgaccccggacaccgacgaatattacaacgcggcagcattatgagctggcaggagaaaatcaacgcggcgctcgatgcgcggcgtgctgccgatgccctgcgtcgccgttatccggtggcgcaaggagccggacgctggctggtggcggatgatcgccagtatctgaacttttccagtaacgattatttaggtttaagccatcatccgcaaattatccgtgcctggcagcagggggcggagcaatttggcatcggtagcggcggctccggtcacgtcagcggttatagcgtggtgcatcaggcactggaagaagagctggccgagtggcttggctatagccgggcactgctgtttatctctggtttcgccgctaatcaggcagttattgccgcgatgatggcgaaagaggaccgtattgctgccgaccggcttagccatgccagtttgctggaagctgccagtttaagcccgagccagcttcgccgttttgctcataacgatgtcactcatttggcgcgattgcttgcttccccctgtccggggcagcaaatggtggtgacagaaggcgtgttcagcatggacggcgatagtgcgccactggcggaaatccagcaggtaacgcaacagcacaatggctggttgatggtcgatgatgcccacggcacgggcgttatcggggagcaggggcgcggcagctgctggctgcaaaaggtaaaaccagaattgctggtagtgacttttggcaaaggatttggcgtcagcggggcagcggtgctttgctccagtacggtggcggattatctgctgcaattcgcccgccaccttatctacagcaccagtatgccgcccgctcaggcgcaggcattacgtgcgagcctggcggtcattcgcagtgatgagggtgatgcacggcgcgaaaaactggcggcactcattacgcgttttcgtgccggagtacaggatttgccgtttacgcttgctgatagttgcagcgccatccagccattgattgtcggtgataacagccgtgcgttacaactggcagaaaaactgcgtcagcaaggctgctgggtcacggcgattcgcccgccaaccgtacccgctggtactgcgcgactgcgcttaacgctaaccgctgcgcatgaaatgcaggatatcgaccgtctgctggaggtgctgcatggcaacggttaataaacaagccattgcagcggcatttggtcgggcagccgcacactatgagcaacatgcagatctacagcgccagagtgctgacgccttactggcaatgcttccacagcgtaaatacacccacgtactggacgcgggttgtggacctggctggatgagccgccactggcgggaacgtcacgcgcaggtgacggccttagatctcagcccgccaatgcttgttcaggcacgccagaaggatgccgcagaccattatctggcgggagatatcgaatccctgccgttagcgactgcgacgttcgatcttgcatggagcaatctcgcagtgcagtggtgcggtaatttatccacggcactccgcgagctgtatcgggtggtgcgccccaaaggcgtggtcgcgtttaccacgctggtgcagggaagcttacccgaactgcatcaggcgtggcaggcggtggacgagcgtccgcatgctaatcgctttttaccgccagatgaaatcgaacagagcctgaacggcgtgcattatcaacatcatattcagcccatcacgctgtggtttgatgatgcgctcagtgccatgcgtagcctgaaaggcatcggtgccacgcatcttcatgaagggcgcgacccgcgaatattaacgcgtagccagttgcagcgattgcaactggcctggccgcaacagcaggggcgatatcctctgacgtatcatctttttttgggagtgattgctcgtgagtaaacgttattttgtcaccggaacggataccgaagtggggaaaactgtcgccagttgtgcacttttacaagccgcaaaggcagcaggctaccggacggcaggttataaaccggtcgcctctggcagcgaaaagaccccggaaggtttacgcaatagcgacgcgctggcgttacagcgcaacagcagcctgcagctggattacgcaacagtaaatccttacaccttcgcagaacccactagcccgcacatcatcagcgcgcaagagggcagaccgatagaaagtttggtaatgagcgccggattacgcgcgcttgaacaacaggctgactgggtgttagtggaaggtgctggcggctggtttacgccgctttctgacactttcacttttgcagattgggtaacacaggaacaactgccggtgatactggtagttggtgtgaaactcggctgtattaatcacgcgatgttgactgcacaggtaatacaacacgccggactgactctggcgggttgggtggcgaacgatgttacgcctccgggaaaacgtcacgctgaatatatgaccacgctcacccgcatgattcccgcgccgctgctgggagagatcccctggcttgcagaaaatccagaaaatgcggcaaccggaaagtacataaaccttgccttgttgtaaccattctgtatttggttaaattgcgagcgagatcgcgtcttcgattgactgcaatttaaccaattaaattctaaaataatcacgaaaaaaattttacttccgcctcatgcggcgaatgtgggaattgcccaggcggcgggggataggggctggagacagttatccactattcctgtggataaccatgtgtattagagttagaaaacacgaggcaagcgagagaatacgcggcttgcacgcgaattggcgttaaagacggctcaaagaaatatcttttattttttaactggttagataaatgcaatggcagtcactgaacaggcatctcttgccataaaactgtcatcactcatcttgacaaatgttaaaaaagccgttgctttggggataacccggtaaggccggagttttatctcgccacagagtaaattttgctcatgattgacagcggagtttacgctgtatcagaaatattatggtgatgaactgtttttttatccagtataatttgttggcataattaagtacgacgagtaaaattacatacctgcccgcccaactccttcaggtagcgactcatgagtaaaccgttcaaactgaattccgcttttaaaccttctggcgatcagccagaggcgattcgacgtctcgaagaggggctggaagatggcctggcgcaccagacgttacttggcgtgactggcagtgggaaaaccttcaccattgccaatgtcattgctgaccttcagcgcccaaccatggtacttgcgcccaacaaaacgctggcggcccagctgtatggcgaaatgaaagagttcttcccggaaaacgcggtggaatatttcgtttcctactacgactactatcagccggaagcctatgtaccgagttccgacactttcattgagaaagatgccagcgttaacgaacatattgagcagatgcgtttgtccgccaccaaagcgatgctggagcggcgtgatgtggttgtggtggcgtctgtttccgcgatttatggtctgggcgatcctgatttatatctcaagatgatgctccatctcacggtcggtatgattatcgatcagcgcgcgattctgcgccgactggcggagctgcaatacgctcgtaatgatcaagcattccagcgtggtactttccgcgttcgtggcgaggtgatagatatcttcccggcagaaagcgatgacattgcacttcgcgtggaactgtttgacgaggaagtggaacgattgagcttatttgacccgctgaccgggcagattgtttccactattccacgttttaccatctacccgaaaacgcactacgtcacaccgcgcgagcgcatcgtacaggcgatggaggagatcaaagaagagctggccgccagacgcaaagtgctgttggaaaacaacaaactgctggaagagcagcggctgacccagcgtacccagtttgatctggagatgatgaacgagctgggctactgtagcgggattgaaaactacagccgcttcctctccggtcgtggaccgggtgagccaccgccgacgctgtttgattacctgcctgccgatgggctgctggtcgtcgatgaatctcacgtcaccattccacaaattggcggcatgtatcgcggtgaccgggcgcgtaaagagacactggtggagtacggcttccgcctgccaagtgcgctggataaccgtccgcttaagtttgaagagttcgaagcattagcgccgcaaaccatctatgttagcgcgacgccgggtaattacgagctggaaaaatccggcggcgatgtggtggatcaggtggtgcgtccaaccggattgcttgacccgattatcgaagtgcggccggtggcgacacaggttgatgatcttcttagcgagattcgtcagcgagcggcaattaacgaacgcgtactggtcaccacactgaccaagcggatggcggaagatcttaccgaatatctcgaagaacatggcgagcgcgtgcgttatcttcacagtgatatcgacaccgtcgaacgtatggagattatccgcgacttgcgtctgggtgagttcgacgtgctggtagggatcaacttactgcgcgaaggtctggatatgccggaagtgagcctggtggcgatcctcgacgctgacaaagaaggcttcctgcgttccgaacgtagcttgatccagaccattggtcgtgcggcacgtaacgttaacggtaaagcgattctctacggcgataagatcaccccaagtatggcgaaagcgattggcgaaaccgaacgtcgccgtgagaaacagcagaagtacaacgaggaacacggaattacgccgcaaggcttgaacaagaaagtggtcgatatcctggcgctggggcagaacattgccaaaaccaaagcgaagggcagaggaaaaagccgcccgattgttgagccggataatgtgccgatggatatgagccctaaagcgttgcagcagaaaatccatgagctggaagggttgatgatgcaacacgcgcagaatctggagttcgaagaagcggcgcaaattcgtgaccagttgcatcagctgcgtgagctgtttatcgcggcaagctaacaggatagcgaagaagactgatgacaaacggaaaacagcctgatgcgctacgcttatcaggcctacattttctccgcaatatattgaatttgcgcggtttgtaggccggataaggcgttcacgccgcatccggcataaacaacgcgcactttgtcttcaataggaagccggaattttccttcggatttccgttaacctaaagcctgtaacgccttttccagcgcgttatgtaacaactggcggtcatgacgatacggaatatcgctggcctccagtacctcctggatcacaatccgctctttcaccgcgctgacatccacttttggcccgacgatgaccgcatcaatgacctttttaccaacatactgctccataattgccagcttgctttccagcttcaaattagccgcaggtaaactcaactcacgccccagattgccgatataaaccatcggcgctggcgtgcggcgtaatgcctgggcgatttccttcagcagcagaattggcatcaggctggtataaaaactgccaggcccaataatgatgagatccgcttcattgatagcgtgaaccgcctcacgcgttgcgggtacattaggcgttaacaataactcttgaatcggcgtagttaactggtcgatattgacctcgccgtaaacttcatgcccctgatcgtcaatcgccatcagatcaacaggatgctcactcattggaatcaaatgcgtatccactttcagcagattacgaattaaattgatggcttccagaggccgcacgctaaggtgatccagcgcctttaacatcaagtttccgagattatgaccggaaagttcgccattgccaccaaaacggtattcaaacatcgcggaggcgacgctcggttccgttatcagctggttgaggcagttgcgcatatcgccccaggcaatgccgccttcactacggcgaatacgccccgtgctgccaccattatcggtggtggtgacgatacccgttaaacgagaacccaaagagctaagactactgagaacgcgtcccagtccatgccctccgccgagagcaacgacacgatcaagatcagccagcgtacgattgcgcatatagtttcctggagtcagattatccgcgctacagtagcgcaaattgcggggaaacagcaattaacctgccaatattgaggatacaaactattttcttctacctctaaaggacgatgcacgctatgcctccctgatgatgtatatcaaagtaaaaccgccattttcccttattctgtagcgaaatagcacgatcatgacgctatatacatgattacatagcgaaagtgtggatggtaaaaatctcatttacacgctagtatcggcataaccactaaacactctagcctctgcacctgggtcaactgatacggtgctttggccgtgacaatgctcgtaaagattgccaccagggcgaaggaagaaatgacttcgcctcccgtatctggaaaggtgtacatggctagtcaactgactgatgcatttgcgcgtaagttttactacttgcgcctgagcattaccgatgtgtgtaactttcgttgcacctactgcctgccggatggctacaaaccgagcggcgtcaccaataaaggctttcttaccgtcgatgaaattcgccgggttacgcgcgccttcgccagactgggcaccgaaaaagtgcgcctgacaggaggagagccgtctttacgccgcgactttaccgatatcatcgccgctgtgcgggaaaacgacgctatccgccagattgcggtcacaaccaatggttaccgtctggaacgcgatgtggcgagctggcgcgatgcgggacttactggcattaacgtcagtgtcgacagtctggacgcccgccagtttcacgctattaccgggcaggataaattcaaccaggtcatggcagggattgatgctgcatttgaggccggttttgagaaggtcaaagtcaataccgtgctgatgcgtgatgttaatcatcaccagctcgacacctttctgaactggatccagcatcgccctatccagctgcgtttcatcgaactgatggaaacgggcgagggcagcgagctcttccgtaagcatcacatctctggtcaggttctgcgtgacgagctactgcgtcgcggctggatccaccaattacgtcaacgcagcgacggtcccgcgcaagtcttttgccatccagattacgccggagagattggccttatcatgccgtatgaaaaagacttctgcgccacttgcaaccgcctgcgcgtttcctccattggtaaactccatctctgcctgtttggtgaaggcggcgttaacctgcgcgatctgctggaagacgatacccagcaacaggcgctggaagcgcgtattagtgcggcgctgcgggagaagaaacagacccatttcctgcatcaaaacaacaccggtattacgcaaaacttaagctacattggcggctaaaacgtcaaaaggagagatcagatgagtcaggtaagcactgaatttatcccgacccgtattgctattcttacggtttctaatcgtcgcggtgaagaagacgatacctccggtcactatctgcgcgatagcgcgcaagaagcgggccatcacgttgtcgataaagccattgtgaaagaaaaccgctacgctattcgcgctcaggtatctgcgtggatcgccagcgacgatgtacaagtggtattgattacgggtggtactggcctgacggaaggtgatcaggctcccgaagcattgctgccgttgttcgaccgtgaagttgaaggttttggtgaagtgttccggatgttgagctttgaagagattggcacttccacgttgcaatctcgtgcggtagcgggcgtcgccaacaaaacgctgattttcgccatgccgggtagcaccaaagcgtgccgtaccgcatgggaaaatatcatcgcgccgcagctggatgcccgtacgcgtccgtgtaatttccatccacatttgaagaaataagtatgagccaactgacccatatcaacgccgctggcgaagcgcacatggtggatgtctccgccaaagcggaaaccgtgcgtgaagcgcgggcggaagcctttgtcaccatgcgcagcgagacgctggcgatgattattgatggtcgccaccacaaaggcgacgtatttgccactgcgcgtattgccggtattcaggcggcaaaacgcacctgggatctgatcccgctctgtcatccgctgatgctcagcaaagttgaagtcaatttacaggccgagccggagcacaatcgggtgcgtatagaaaccttatgccgcctgaccgggaaaaccggtgtcgaaatggaagcattaaccgcggcctccgtggcggcgctgaccatttatgacatgtgcaaagcggtgcaaaaagatatggtgattggtccggtacgtttgctggcgaagagcggcggcaagagcggtgactttaaggtggaagcggatgattaaagttctttttttcgcccaggtgcgcgagttggtgggaacagatgcaaccgaagtggctgcggatttcccaactgttgaagcgttacgccagcacatggctgcgcagagcgatcgctgggcgctggcgctggaagatggcaaattactggctgccgtcaaccagacgctggtgagttttgaccatccgctgactgacggcgacgaagtagctttcttcccgccggtaaccggaggttaagatggcagaaaccaaaattgttgttggtccgcagccgttcagcgtaggagaagagtacccgtggctggcggagcgtgacgaagacggtgcggtagtcacctttactggtaaggtgcgcaaccataacctgggcgacagcgtcaacgcattaaccctcgaacactatccggggatgactgaaaaagcactggcagaaattgttgatgaagcgcgtaaccgctggccgctggggcgcgtcactgtgattcaccgcatcggggaattatggccgggcgatgaaatcgtttttgtcggtgtcaccagtgcgcatcgcagcagtgcgtttgaagccgggcagtttattatggattatctcaaaacccgcgcaccgttctggaagcgcgaagccacgccggaaggcgaccgctgggttgaagctcgggagagcgatcagcaggcggcaaaacgctggtaattttttgttagccggataaggcaccgctgcgtccggcaatttcaccgctcagtacatacgtttacgctgcgtcgatgcacagcctcatcattttgcagtatccttaagatattccttatatcttcaggagatcgtcatggacagattcccacgttctgatagtatcgtacaaccccgggctggcttgcaaacttatatggctcaagtctatggctggatgaccgttggcttgttgctgaccgcatttgttgcctggtatgcggctaattccgcggccgtgatggagctgttgttcactaaccgtgtctttttaatcggtctgatcatcgcgcaattagcattggttattgtgttaagtgcgatgattcaaaagctgagcgcaggtgtaacgacgatgctctttatgctttatagcgcgctgacgggtcttacgctttccagtatattcattgtctataccgctgcttctatcgccagtactttcgtcgttactgccgggatgttcggcgcaatgagcctgtacggttacaccacgaagcgcgatttaagtggctttggcaatatgctgtttatggcgttaatcggcattgtgctggcaagcctggtcaacttctggttgaaaagcgaagcattgatgtgggcagttacctacatcggcgtgattgtctttgtcggattgacggcgtatgacacgcagaaactgaaaaatatgggtgagcagattgatacccgcgacacgagcaacctgcgcaaatattccattcttggcgcgttaaccttgtatctggacttcatcaacctgttcctgatgttgttgcggatcttcggcaaccgccgttaattctttttcaccatcactatcccggccatgtgtcgggatttttttcttactaaaaacgacacttaacaagtaccaggtataaaatatgccttatggacgagcggaagcgttttctgtatccataaatgcaaaagtattttgtatgcgtggttttaaatttattgatggtgaatattaatattttttctaaggataactaaaagaatggaaagttacagccaaaacagcaataaattagattttcagcacgaggccaggatattaaacggtatatggctcattaccgctttaggtttggtggcaaccgcaggactagcctggggagctaagtatatcgaaattacggcaaccaaatatgatagtccaccaatgtatgtcgccatagggttattattactttgtatgtatggcttaagtaaggatatcaacaagataaatgccgccatcgcgggcgtaatatatctgtttttactctctttggtggcgattgtcgttgcaagtttagttcctgtatatgccattatcatcgtgttcagcactgcgggcgcgatgtttttaatcagtatgctggccggtttattatttaatgttgatcctggttctcaccgttttatcattatgatgacgttgacagggttggccctggtaatcatcgtgaatgcggcattaatgagtgaacggcccatttggataataagttgcttaatgattgtgttatggagtggcattatcagccatggacgaaataagctccttgaattggcggggaaatgccatagtgaagagttgtggagtccggttcgttgcgcttttacaggtgcattaacactctattactattttatcggcttctttgggatacttgccgcgatagctataacgcttgtctggcaaaggcatacgcgtttttttcattaaccgtaaatgcacatactaaagaacttaactaaacttcacatcgccgcttcatttttcgcccgtagcttcttcgcctggctttccagcaacaggtaacagatcagcgccagcagcagtgggataaagtaatacagcacacggtaagcgagtagggcggcgataattgtacctttggaggtatgctccccagccagtagtgcgataaacaccgcttccagcacaccgatccccgccggaatatgcacgatgacgccagcaatactactaaccagtaacacgcccagtacaaagaaatagttcacgctttgaccaagtaacagccagataatcgcccccattaccatccagttaacgctggaaatcagcatctgagcgagggcgaatttccaactaggcagcaccagcttttgccctttgatggtcatatggcggtgcttcgcgaaagcgcaaaaccacaaataaaccgcgataatcatcagtaagccaatgccgagaatacgcagcgtagtttgatcgacataccagtgatccggcaactccaccacgcctgcggtaaagataatccctgccagtaaaatgtagcccagccagttggtggtaatactgaggctgaaaatccgcgtaatagtgctaccgggcaaccccagacgagagtacaaacgatagcgcataccaatgccgccgacccaggtactgagcgtcaggttgaaggcgtagcagataaagctcaccagcatcacctggcgcttcgccagtttgtgaccgcagtaaaagcgggcgagcaggtcatagcagccgtaaatcagatagctgacgaccaccagcccgaccgcactaagcagcgcaacgcgattgtagtcgcggatgaccttccagacctcttcccagtccacttttttggcgtagaccaccagcaacacaatcaccgcgataaaaaacagccaggtgaggatcttctttgctaagcgccagcgcgggtgacttttactcatcagggttttacccccgtgttttcagtttctacccgatcctgcgtttccattgtcggttgtgcgggcggatcaacctgcgccagacgtggcgtgtgtgccggaagccagccaaccagcgccgggaagtggcgtaaaaagtggaacgccagcacgcttttggtcaggttccaccaggtgcgtttgggcagcatggtttcatccacctgctgacaatctgcggcaataatgccgttcagattatcgcgcagcgtctggttaaaatgacgatcgtggatgatgacatttgcttcgagattcagactcaaactgagcggatcgagattactggaccctactgtcgcccagtgatcgtccatcaatgccactttgccgtggagcgggcggcggcggtactcaaaaacctgaacgccgcctttaaccagatagttatacagcaagcgcgcaccgactctgacaatcggcatatccggttcgccctgaatgatcagtttgatccgcaccccgcgccgtgccgctttacgcaaggcgtgtaaaaatcgatagccggggaagaagtaggcgttggcgataatcacttcccgccgcgcctgagtgagcattttcaaataatggcgttcaatatcatcgcgatgttcttcgttatcgcgccagaccagcaatacctgcgcttctcccggctggcggttctcttccgctttgtgatgacgtcgccaccagcgtcgtgccgcgctctgtccaggcaggttttccagctcaaactggagaatatcttcgacaatcggcccttcaaggcgtaccgcgtaatcctgtttagcctctggaccgtagctggacatatgctcggcggagtaattcagcccgccaataaaggctatacgcgcgtcgatcaccacaattttgcgatgcatccggcgaaacacattggtgcgcataccaaaaaggcgagggcggggatcgtagtagcggaacactacgccagctgccgtcagttcattgacaaactcatcgctgagatccgggctaccgtagccatccagcaagacttccgctttaaccccgcgttgcgctgctgccagtagtgccgcatgcagttgtttgccgacgtcatcctcaaaccagataaacgtttcaagaatgatgcgttcttgtgcctcgccaatcgccttaaacaccgcgggataatattgctcgccgttttccagcaactggatcttattgccttcgcgccagctacatttcataaatgaatctccgcacttaaaggggcatgatcagaaaggtgtcgccatgtccgcagcggcaacgcggttggcgcgctggcgctggcatttttgacgtagatcctgtccagtcgtagtagaggaaattgcaccggaaacgtgcgcgccgggcgtccgtgggcgcgggtaaaaatctcatccagtccggcctgcacttttaacggatgattagctttttgccgccagtcattgaaatcacccgccaccaataccggttcgccgtccggtagctcattcacccattcggcgagcatcgcaagctgcgcctgacggtgcgcctcacgcaggcccagatgtacgcacatcacatgaatcgcttttccggtcatcggcggcacaatgcggcagtagagcacgccgcgcttttccgcaccatcgacgctaacatcgcgattctcataatgttcaatgggataacggctcagtacggcgttgccgtgatgcccttccgggtatacggcattgcgaccgtaggcaaaatcgctccacatagtgtcggcgagaaactcgtagtggctggtatcgggccagttttccacatgcagcggatgaacttcgtgcgcgcccatcacttcctgcaggcaaacaatatcggcgctgacggtacgcacggcgtcgcgaagttccggcaaaatgaagcgtcggttaaacgcggtaaagcctttgtgaatattgatggtgagcaccttgaagctaaattgttgtgtttgatcgggcataattttcctgtctttgcctcttatctcattgaaatagtgtagtcggcgtcacaaaaaggtgcggtcttacggaattttccgtaaagttcggtactctgagtaagtagagataaattcttcaggagagaagccatgaagtggcaacaacgtgttcgtgtcgcaacgggtctaagttgctggcagattatgttgcatttactggtagtggcgctgctggtggtgggctggatgagtaagactctggttcacgtcggcgtgggattatgcgcactgtattgtgtcacggtagtgatgatgctggtgtttcagcgccaccccgagcaacgctggcgtgaggtggcagacgtgctggaagagctgaccacgacctggtattttggcgcagcgctgattgtgctgtggctgttgtcccgcgttctggaaaacaactttttgctggcaattgcagggctggcaatccttgccggcccggcggtagtgtctttgctggcgaaagataagaagttacatcaccttacgtctaaacatcgcgtacgccgctgattacatcaccttacgtctaaacatcgcgtacgccgcactccctgtcgtggccgttatcaccagtagcggccacaaactattccacacaatatccagactcgcatccttcaaataaatctgcttggtaatgtccgtaaagtggcgaatagggttaatccacgtcaggttttgcagccataccggcatgttttccaccggagaaacgtaaccggaaaggagaatggcgggcatcataaagacaaacacgccgataaacgcctgctgttgtgtactacagagactactaatcaacagaccgaatcccaccaggcttaaaccataaatcaccatcgtaaagtagaacagcgccaggcttccggcgaaggggatttgatacgcccagataccaatcgccagcacaatggtggcctggaaggtggcgacaattaacgccggtacggctttgccgatgaagatctgccaggtggtgagcgggctaaccagtagctgatcgagcgtaccttgttcacgttcgcgggcgacggaaagactagtgacgatcattacgccgatagtggtgatcatggcgatcagactcggcaccacaaaccatttgtagtcgagattcgggttataccagttgcgtaccaccagctcgctgttgttaggtttcggttttccttccagcagctcctgctgataatttttgacgatctgttgcaggtagttggcggcaatttgcgcactgttggagttacgcccgtcgaggatcaactgcaaaggcgcggtctggaaggtatccagtttgcggctgaagtcagccgggaaacgcaccagtagtaacgccttttgtgtgtcgatggttgggcggatctcctgtgggcttttcagcagcagcacatgagtaaaggcgctggcgcgggcaaaacgttgggtcagctccacgctatgctcgccgttatcttcatcgtagatggcgatggtggcgttagtcacttccagcgtggcggcgaacgggaacaggatcacctgaattagcacgggtaaaatcagaatcgcgcgggtttgcggttcgcgcagcaagctctgcaactctttgcggattaacgtccataagcgatgaaacatgctcttctccttaatccagccgacgtttggttttcagccacgtcaggccgataaacatcaccgcgctagcgatcaaaaacagcacgtttaccaccagcaccactggaatattcccggcgaggaacaggctttgcagggtgctgacgaaataacgagcgggaataatgtacgtcaccgcgcggatcaccgcgggcatactgtcgatctgaaaaataaagccggaaagcataatgctcggcagaaaagcggcgttcagggcgacctgagcggcattgaactggttgcgggtaatcgtggaaatcagcagccccatccccagggtactgagtaaaaacaggctggagataaaaaacagaatcagcaggctcccgcgatacggcacgccgagaataaacacactcaccagcatacacagcaacatcgccagcatcccgagaaagtaataagggatcagcttacacagcagcagttccgtgcgggtaatctccgtagagagcagagcctccatggtgccgcgttcccattctcgcgccaccaccaggctggtgagaatcgcgccgatgaccgtcatgataatggtcaccgcaccggggataatgaagtgctggctaatcgccgccgggttaaaccagtagcgggtttgtacatcaataagcggttcaaaagtctgcccgttgtcctccgctcgctgcatttgccagatctgccagatcccttcgacatacccctgtacaaagttagcggtattcggctcactgccgtcggtgatcacctgaatcggtgcggtggcgttggcgcgctccatctgttccgcaaaatccaccggaataaccaccagaccgcgaattttccccgcctgcattttggcgatcagttcctgacggttatcgctgatggtggcgtcgatgtaggggctaccggtcatggtgtgggtgaaatccagcgccgcttcgctacgctgttccagtaaaatcccgacccgcagcttgctggagtcgaggttaatgccgtaaccaaaaataaacagcagtagcagcgggatcactaccgcaatcagccagctactcggatcgcgaacgatctgccgcgtctctttaacgcacagcgcccgtacgcgacgccaggacaggatcgggttactcattgctatgctccttatcccagtcgtggatcaactgaataaaggcttgctccatggtgggatcgggttgctcatcgttagcgctctgtgctttcaaatcgtccggcgtgccgctggcgattaatttcccgcggtacaccaggccgatgcggtcgcaatattccgcttcatccataaagtgggtggtgaccatcaccgtgacgcctttctctaccatgctgttgatgtgcagccaaaattcacggcgggtgagggggtcaacgccggaagtcggttcgtcgagaaacagaatgtccggttcatgcatcaggctacaggccagcgccagccgctgtttaaaacctaatggcagttcatcggtggcgtgggaggcgatacttttcaggccgaacgcctcgctcatgcgggagattttttcgttctgcgcccgaccgcgtaagccatacacaccagagaaaaagcgtaaattctgttcgaccgtcaggttaccgtagaggctaaatttttgcgccatatagccgagatgctggcgcgctttaccggaactctctttcagatccatccccagcaccagcgcctggccggaagtcggcaccagcaaaccgcacatcatcttaaaggtggtgcttttacccgcgccgtttggccccagcaaaccaaaaatctccccacgtttaacggcaaagttgacgtgatcggtggcggcaaaatccccaaatttcttggtcagttctttcgcttcgatcaccgtctcgccgggtgtgccttctaccgtatgtaatattgcgcccagcgggctttcgctggttccggcaccgcccagcaaatcaataaacgcatcttcaaaacgcggcgtagtttcgttgatgttgatttccggcatcccgtcggcatggcgaatatcgtctggtgtggcctcttttttgaggatcagacgtacgcttttcccctgaatcatgccgtcgctgacctgcggcagtttcaaggcgcgttgcaacagtttgcggttgccctcgtgtggactggtcatcagaaagctgcgtccggccatggtttgtgtcagggcttttggttctccctgatacagcaactcgccttcgttcatcagtaacacgtcacggcactgctcggcttcgtcgagatagctggtactccagaggattaacatcccttcgcccgccagctcatgcaccatctgccacagttcgcgccgactgatagggtcaacgccgacgccgggttcatcgagcagcaacactttcggttcgcccaccagggtacaggccagaccgagtttttgtttcatcccaccggagagcttgcccgccaggcgtccggtaaacggcccaagagacgtaaactccagcaggcgagcaaaagtttgcttacgtgcctcgccggtgacgctgcgcaaatccgcgtacagattgaggttctccatcaccgtgagatcttcatacagaccaaatttctgcggcatataaccgagcacggcgtgcagcgcgccgtcgtttttgatcggatcaaagccaatcaccgtggcactgccgctgtcgggtttcagtaatcccgccaacatccgcatcagcgtggttttacctgcaccgtccggccccaccaaccccgtcacataaccggcgtgaatggtacaatcgagcggcgcgacggcgggcttgtccatgcccggaaagcgtttttccaggccgttcagcgtgataacggcatcattcatgtcctgcctcgtcaccgaattgtaccgtcactggcattccctggcgtaacgcatcatcggcgtcggtcaccacaatacgcaggcgatagacgaggtcggtacgcagatccggcgtttcgacggttttcggggtaaattcagcagtcgggctaacgaaaccaatctgcccgtgatacggcttgtccgggcgaccatcggtataaagcagcactttgcgccccggctgggcctggtcaagattacgttcatcaacataagcgcgcacccacaccggacgcgttagactaacggtaaacaccgtgccaccttcattgaggaccgtgcctggctccaccgcgcgcgttaacagcgtgccatcagacggggctatcaacgtactgtcctgtaaattcaactccgcctgcgccagttgcgcctgcgcctgttcgaggctggctttcgcctgagcgatgtcctgttcacggttaccggaacggtactgacgcaatttatcctgtgcacttttcagcgttgcctgcgcctggtcgcggctggagcgggcattttccaggtcatttgcgctaatagtgcggcttttccacaacccttgctggcggttatagaagttctgcgcatagtcataggcggcttgcgcctgtttcaccgctgcggcggcctgagcgatttcttcattgcgatacccggcaagcatcaggtcatactgcgcctgtgccacgctaacacccgctttcgcctgcatcagggcaatctcatacggcttgtgatccagttcgcccagcacctggcccgctttgatagcatcaccttcgtccaccgccaggctttcaacgcgccccccaacacggaaactaagatttaccgtacgaatatccacgttgccatacagcgtcaggccgttatcctggcggctttgataccaccagtagcctccggcaaccacggcggcaagtaccactaccgccaatccgatcacgacaggttttttcatcactacaaactcctttgcgataattacaaactcctttggcttaatccttgcaaaatcaggtcgatatgacaggtcaccgtctggttgatcagttcggtcttttcttcatcgaacgcggtccagccggtacgtaacagaattgtttctttgccaagacggaacgccagaatctcaccaatcaacgcatgggtatgaaggatcatgcgggtgtcattggcgtcgcagccggtccaggcggcaatcaggcgtgtcaggtggctgtgtagcggactaatcacctgttcgtgcaccaggtggtaggctgccgtgggagagagctgctcacgggagataaacttgctgaggttgacggtgtcatcctgggtgagcagcttaatcatgttcctgcaggcgcgaaggatcagttcacggatggcagcccgatcaggctgtggttgcgcgaacaagcgttcggcttcctcggcatgcggacggaactgctcgccaataaaatcggcaatccactgggcgcaggcgaggtacaaatcttctttgctaccgaagtagtaggtgatggcagcgatattctgcccggcctgggcggctatctcgcgagtggtggcgttcattccatattcaccaaactgcgccagtgcggcagcaatcagctgttttttcgcctgttcacccttgattgtcatggcaggattattcatcgcacagtccattcttaatcaaatgattgattaagattatgactccataggggagttgtccagtatggctaagaattttagcaacgccagtcacagggataatttatgcgctgcgtcacaaaaactgctacactccgctccctcatgacattgtggtttttgtcattttccttttcagtatctccctgaaaactacaccggtaacggtcggggcggttcggagtagttatgtctttcgattctttgggtttaagccctgatatcctgcgcgccgttgccgagcagggttaccgtgaacccacccctattcagcagcaggcgatccctgcggtgctggaaggccgcgacctgatggctagcgcccagaccggcaccggcaaaacagcgggctttacgctgccgctgttgcaacacctgatcactcgccagccgcacgccaaagggcgtcgtccggtacgtgcgctcattcttaccccgacccgtgaactggcggcgcagattggcgaaaacgtccgtgattacagcaaatacctgaacattcgtagcctggtggtgtttggtggtgtgagtattaacccgcagatgatgaaactgcgtggcggcgttgatgtgctggtggcaaccccgggacgtttgctggacctggaacatcagaatgcagtgaagctggatcaggttgaaatcctcgtcctcgatgaagctgaccgcatgctcgacatgggctttatccacgatatccgtcgcgtgttaacaaaactacctgcgaagcgccagaacctgttattctccgcgaccttctctgacgatattaaagccctggcggaaaaactgttgcacaacccgctggaaatcgaagtggcacgccgcaataccgcgtctgatcaggtgacccagcacgttcactttgtcgataagaaacgcaaacgcgaattgctgagccacatgattgggaaagggaactggcagcaggtgctggtgtttacccgtaccaaacacggcgctaaccatctggctgaacagctcaataaagatggcatccgtagtgcggcgatccacggcaataaaagccaaggtgcgcgtactcgtgcgctggctgattttaaaagcggcgatattcgtgtactggtggcaactgacatcgctgcgcgcggcctggatattgaagagctgccgcacgtcgtcaactatgaactgccaaacgtacctgaagattatgtccaccgtatcgggcgtaccggtcgtgcggctgctaccggtgaagcgttgagcctggtgtgtgttgatgaacacaaactgctgcgtgatatcgaaaaactgctgaaaaaagagatcccgcgcattgcgattccgggctatgagccggacccgagtatcaaagccgaaccgatccagaacggtcgccagcaacgtggcggcggcggtcgtgggcaaggtggtggtcgcggtcaacagcaaccacgccgtggggaaggtggcgcaaaatctgcaagcgcgaaacctgcagaaaaaccgtctcgccgcctcggcgatgccaaaccggcaggcgaacaacaacgtcgccgccgtccgcgtaaacctgccgctgcgcagtaatcttttatgccgggctatgcccggcatcaggctgatgaacaaacgcaaaactgcctgatgcgctacgcttatcaggcctacgtgaactctgcaatatattgaatttgcatgcttttgtaggccggataaggcgtttacgccgcatccggcatttcacaacaagcacttgtcagcaatttgagaacacgggaaaaaatttatctgttttaccgcccataagccaccgagacgttacttctctatagccaattgttcgcgcaactccattaaaaggtagcccagtcgattcttgcccttaccatgaccaccgtctccccagtaagcatcgttttccgtatgctcaaccagttttgcgggcgcggttgccagcaagagcgcacgcagttctgcatgctgttcgaatttagcgcgaagtgcttttcgcatcacctgttctttgacgctctcccagtttttacgcagaggcttagaacgatcgcgccccatgcgtgcggcgaccataggggaagaaacccgacggatctcttcgcggtatttttcatcaaggaatttttgtgcctgaaaatagtgttcactggtaggccaggttttcccgtcaaccttgatgggccaggcggcaaagttagaaaaatcaccgtagtcatcgctggtgctgtagaaatttatgatggtgtcttgcatgacgtgttggatcctttgtgctcgaacgggcattaaaccgcattatgttggtggttattgcgagccgctttccagaaacagaaaaaccattacccctgaaaaccgaaaaatgccacaatattggctgtttatacagtatttcaggttttctcatggcattaaccgccgcgcttaaagcgcaaattgccgcctggtataaggcgcttcaggaacagatccccgactttattccccgtgcgccgcagcggcagatgattgcggacgtcgccaaaacgctggccggagaagaagggcgacatctggcgattgaagcccccaccggcgttgggaaaacgctctcttatttgattcccggcatcgccattgcccgcgaagagcaaaaaacgctggtggtgagtaccgccaacgtggcattgcaggatcagatttacagcaaagatttaccgctgctgaaaaagatcattcccgatcttaaattcactgccgcttttgggcgtgggcgctacgtttgtccgcgtaatctgacggcgctcgccagtactgaacccacgcaacaggatctgctggcgtttcttgacgacgaactgacgccgaacaatcaggaagagcaaaaacgttgtgcgaagctgaagggcgatctcgatacttataaatgggatggtctgcgcgatcatactgatatcgctatagatgacgatctctggcgtcgtttaagtaccgacaaagccagctgcctcaaccgcaattgttactactatcgtgaatgcccgttttttgtcgctcgtcgggagattcaggaagcggaagtggtggtggcaaaccatgcgctggtgatggcggcgatggaaagcgaagcggtattgcctgacccgaaaaatttactgctggtgctggacgaaggccatcacctgccggatgtggcgcgggatgcgcttgagatgagcgccgaaatcaccgcgccgtggtatcggctacagctggacttgttcacgaaactggtcgctacctgcatggagcagtttcgcccgaagaccatcccaccgctggcgatccctgaacgtttgaatgcgcattgtgaagagttgtatgagcttatcgccagcttaaacaacattctcaatctctacatgcctgccgggcaggaggcagagcaccgttttgcgatgggcgaactgccagatgaagtgctggagatctgccagcggctggcaaaactcaccgagatgctgcgtggcctggcggagttatttcttaacgatttaagtgagaaaaccggcagccatgacattgtacgtctgcatcggttgattttgcagatgaaccgcgcgttggggatgttcgaggcgcaaagcaaactctggcggctggctagcctggcgcaatcttccggtgcaccggtgaccaaatgggcgacgcgggaagagcgcgaagggcagctacacctctggtttcactgcgtgggaatacgtgtcagcgatcagctggaaaggctgctgtggcgcagtattccgcacattattgtcacctccgcaaccttgcgtagcctgaacagttttagccgtttgcaggagatgagtggtctgaaagagaaagcgggcgaccgttttgtggcgctggattccccctttaaccactgcgaacagggcaaaattgttattccccggatgcgcgttgagccttccatcgacaacgaagagcagcatattgccgaaatggcggcctttttccgtaagcaggtggagagcaaaaaacatctcggtatgttggtactgtttgccagcggacgggcgatgcagcgctttctcgactatgtgacggatttacgtctgatgttgctggttcagggcgatcagccgcgttaccgtttagttgaactgcaccgcaaacgcgtcgccaacggtgagcgcagcgtgctggtgggcttacagagttttgccgaagggcttgatttgaaaggtgatctgctcagccaggtgcatatccacaaaatcgcttttccgcccatcgacagcccggtggtgatcaccgaaggggaatggctgaaaagcctcaaccgctatccgtttgaggtgcaaagcctgccgagcgccagctttaacctgattcagcaggttgggcgactgattcgaagccacggttgctggggcgaagtggttatctacgacaaacgcttgctgaccaaaaattatggcaagcgactactggatgcattaccggtatttccgatagagcaaccggaagtccctgaaggtatagttaaaaagaaagaaaaaacgaaatccccacgccgtcggcggcgttaatgatgtgagtcaggtaaggagtcgtaaatggactatcgcaaaatcattaaagagatcgggcgcgggaaaaaccacgcgcgcgatttagaccgggatactgcgcgcggtctgtatgctcatatgctcaatggtgaagtccctgaccttgagttgggcggcgtattgattgcgctgcgtatcaaaggagaaggggaagcagagatgctcggcttttacgaagccatgcaaaatcacaccatcaagctgacgccgccagcaggcaagccgatgccgattgtcatccccagttacaacggcgcgcgtaaacaggccaacctgacgccgttgttggcgattctcctgcacaaactcggttttcctgtggtggttcacggggttagcgaagatccaacccgcgtgctgactgaaaccatttttgaattgatgggtattacgccaacgttgcacggcgggcaggcgcaggcgaagctcgacgaacatcaaccggtgtttatgccagtcggcgcgttttgcccgccgctggaaaaacaactggcgatgcgctggcggatgggcgtgcgtaacagtgcacataccctggcgaaactggcgacgccatttgccgaaggtgaggcgctgcgtctttccagcgttagccatccggaatacattggacgcgtcgcgaagttctttagcgatatcggcgggcgggcgctactaatgcatggtactgaaggtgaagtgtatgctaatccgcagcgctgcccgcagatcaatctcattgaccgtgaagggatgcgggtgctgtatgaaaaacaggacactgctggtagcgagttactgccacaagcaaaagatccggaaaccacggcgcagtggattgagcgttgccttgctggcagcgaaccgattcccgaaagcctgaaaatccagatggcttgctgcctggtggctacgggtgaagcggcaactatcagcgacggcctggcgcgcgttaatcaggcattttaattcttttctcagccggatgagccatgtcatccggcttttaccccaccgcaatatgaaattcctgcatctttattgaccttcccacgcccggcgtgcagcataaaaatacaacaaacacataacataaacaggagttaaccatggaaagtggtcatcgctttgatgctcagacgctgcacagttttattcaggctgtatttcgtcagatgggtagcgaggaacaagaagcgaaattagttgccgatcatttaatcgcggcaaacctggcagggcatgatagtcatggtattggcatgatcccaagctatgtacgctcctggagtcaggggcacctgcaaattaaccatcatgccaaaaccgttaaagaggcgggggcggcggtcacgctcgatggcgatcgcgcatttggtcaggtcgcggcacatgaagcgatggcgctggggattgagaaagcgcatcagcacggtattgccgccgtggcgctacataacagccatcatatcggccgtatcggttactgggcggagcagtgtgcagcggcggggtttgtctctatccactttgttagcgtggtcggtattccaatggtcgcgccgttccacggtcgcgacagccgctttggcaccaatccgttctgtgtggttttccctcgtaaagataatttcccgctgttgcttgattacgccaccagcgccattgcatttggcaaaacccgcgtcgcctggcataaaggcgtccccgtgccgccaggttgcctgattgacgttaacggcgtgccgacgaccaatccggcggtaatgcaggagagcccgttgggtagcctgttgacctttgccgaacataaaggctacgcccttgcagcgatgtgtgaaattcttggcggggcgctttccggcggtaaaacgacgcatcaggaaacgttacaaaccagtcccgatgccattcttaactgcatgaccactatcatcatcaacccggaactcttcggcgcgccggattgtaacgcgcagaccgaagcctttgccgagtgggtgaaagccagcccgcatgatgatgataagccgattttgctaccgggcgagtgggaagtgaacacgcgtcgcgaacggcagaagcaggggattccactggatgcgggaagctggcaggccatttgtgatgcagcgcggcagattggtatgccggaagagacgttgcaggctttctgtcagcagttagccagctaaaaaaaagcccgtccagtggcggacgggcaaacaagggtaacataggatcaatgagggttagagcatatgcgtctgtcggcaaacagacagggaaatacttgtgctggacgtagcgtaaacgcctgatccgtccaacggttcggattttgtaggcctgataagacgcggtagcgtcgcatcaggcatctgttgccggatgcggcgtaaacgccttatccgtcctacgaattacttataaattaccgcagtaccgcttaatttattgttgttggtggcggaagtgatgctgtatccactggcaccggctgccgcggctttctcagccagtttcgcttccagggcatcgagggtggatgcgccatcggcagaaaccacgccgattttattcatgttctgtgcctgggatgccgttaccggttccgccgcgaacacgccaaaactcagagtactaagagccatagcagcaacaacagtattgatagttttcataattaatctctcgcaggtgatttttgtataagtgacgttgtttcgtcgatgtgatgagtatcacgtttttttacgagagataaaatcgaagagaattgaccgccttgttcaaataaattgattgatatctaacctactgataaaccatttatttgttgtacttatgaacttgttttataccgcgtggcagtcacagcagcgttaaaggcacggaatgacacgcaaaatacaaattatactcgctatgcatctcgccagttgtagttaacgtaactggctgtctttgctacctctgcgattatatcctgtataagctggtttttgtaaatctttctcctgctgacaatgaatacataagcgcacgccaggaatggcttcccgacgggcctgcgggatgggggcaccgcactcttcacattcatccaggctttcgccgcgcggaatttcaccccgagcgcgggcaatcgcatcttcaattgtactgttgatctgttcgttgacggcgtcatcgttagcccaaccggatgccatatcgacctccccatatcaatacttgtacagttaagtgtagctaatccagggacgaactcgggcagttcaagcatcagatctcgctccattcccgcagcagattatgataaagattaagcaggctcaggatctcttcactttcgccgtagcggcttttcaggctctgaatattgttgtccagttcaaacagcatggcgcgctttttatcatcgcggatcatgctctggatccacataaaacttgccactcgtacgccgcgggttacgggtgtcacgcaatgcaggctgctggagggatacaacacgagatcgcctgccgggagttttacccgatgttgtccgaaggtgtcattaacgaccagttcgccgccgtcgtagctttgtggatcgcttaaaaacagcgtggcagaaaggtcagtacgcatccagccgttttgtggatggctgcgtactgcgccatccacatggaaaccataggtttcattgttctgatagcgattaaacagcggcgtggaaagggtacgcggcaaggccgcggcaaagaataaagcatgttggttaaccgcgttcagcacctcattttgcagggcggcgtataacgtgctgcgggtgtcgacctgttgattgttcttaacttgcgcaccttgtgcgccggtggtgacgcgtccatccacccattcggcttgttccagttgttcgcgaaaacgagcgacgtcctgtgggcttaacacgccgggaatgtggtacatcatacaatttctccaaaaagtggggcctgcgccccacatctgaatcagaaatgcatattggctgtgagcaagaaggttcttggctcgcccgggtgataacggtagccgctcttgttgatactggcgacgtaatcggtatcaaacaggttgtaaacgtttagctggaagtcgagattgcgattaactcgataccccagtttggcatcggcgacccagtaaccttcggtaaacgctggcgttcccaccgcgccgtcactacctttatgcatactgccgatatagcgtgcgcccgcgccaacagagatatcgtcggttgcctgatattggctccataaggtgaaggcgtgctccggggtatacggcaggctactggaaccatcctgggcaacatctttgccgtttttgatggttgctttttgctgggtatagccgccaatcacctgccacgcgggagtgatattcccggccacggatatctcatagccttcgacgcgtttcttaccgtattggctgtaagttccgtcatcattttgctcaacttcattttcgatatcagtgcggaacagcgcggcggtgagcaacagacgtttatccagaacctgccatttggtgccaatctcgctggtgttggctttttgcggtttaaaatcggtgcggttggcactgttaccgctgccagactgcgcaagggcgaagttgttgccgcccggaggctgctgggaaacggcatagttaatatagacattgccgttttccgtcaggtgatacagcgccccggctttccagttcatcagattgccgctcttggcggtgtcgacggtggtgaccggagaaccttttgccacaccagttgggcaggtgatggcaccgcgtccgctgccgccgcaggcggtggcactgtcatattcagtatgataattatccagacggatcccgccgttcagctcaaaatcacgggtgatttgcagcgtatcaaaggcgtaaattgcgaaggtatccgtctgaccattggcgtttgcgccgttgcgcgtcaggccgccgggatgaatgctgctgtcaggatgataaatatttaccgcgggtaacgtcaccggattaacgccgtagttagtctgcgtttcacgggtaaattccacgccggtactgacatcatgaccgatagaaccggtatagaacgtgctggtcaggttggtctggttggtgagaattttattactcacatctttggtattcgccgtgcgactccaggtccagctattcacatcgctggtgggctgagtaatattgctcgccccgcccataatcgccgtcatcaggtaatcctgctttacgcggctccaacgggtagtattgcgaatggtggtgttatcgttgatgtcgtgctcaaaacgcatggtggcggtgtcggtggtgctatcgtcgtaatcggaatccgtgccgtaaaagttatgagtatcaacttttccggaatgattcagggccgccgttcccgcagatggggcagaatagcccggcaaaccgatggtcggaatgccgccgtctggcgtgttgtgctgggtgacatgcagataattaagatacaaacgattcgctgtaccaaggccaaaagcgacagaaggggcgacgccgtaacgctcatttttgactttgtcgcgtccggcatcgtgcgttttttcgcccattacattcaggcgcaccgcggtggtatcaccaatgacctgattgacgtccagcgtgccgcggcggaaccaggcgctgccaatactggcggaggcgtcaatgccggaatcattgcgcggctgcttgctgatcatattgatgctgcctgtcggtgcgctgcgcccgtagtcggtgccggacggccctttaatcacttcgacctgctcggtattgaaggtgtcgcggctgacgctgccgatatcgcgaatgccatcaatataaatactgttagaggtatcggcaccacgcatataaatggcgtcgccagtggtggagttaccgttctcacccgcaaaaaacgcacccacgccggggacgtttttgagcgcgtcggtaaggttggttgcgccctgatctttaatcacttgttcagaaattaccgtcatcgtgcgggtagtatccgctaccggacggctgaatttcggatcggcagattgttgtggcgcataaaggctaggcgtacttgcttcgacaaccagcgtgtcatccgcgttagtttgcccttcggcggcgagtgcctgagccacaggcgtgatgccaatacaaagaccggcaaagaacgtgaggctatgaaattgtctggcagggaaattgcgattgttttccattttgcaggtgactttttcttatatgttgaaattttcactgccacgagaaagcctctctgcggatgcgatgccactgttaatcccgtgatagtgctcgtgaaagtgataataattttgataagcattatcacttggagcgattttctatcacccattgcgcgaaaaagaaatacatttatttacattgagttcatatttgatgttttttgattacaaaacagacgaaaactgcatccagaggcgaatgcagttacgttggtggggttatttgtagatggttgcagtaccgaacatctggtcatttccgcctgcggaattaatgacataacctttcgcgccttgttcgcgcgctttttctgccagtttatcctccagatcgcttaggttacttgcgccagttgcgctaacggtaccggcgggccgtagctgaccgctgtccaggttactcatcggttgcgcggcataagccgtgagagagattccgctcaggacggtggcaatcagtagtgtgaggcactttttcataatgacatcctcataaatacaacgggtagtgcctgataagtgtaggtcgcctgcgcgatgcaaatgacgcaaaaaattgacagagatgtgcttattttttgaacgatatatttttacaaaataagacaaatcaatgacatgcataatgctgatttttatgatgaattgccataaaccatagccatgttaaggttttggggaatgataaacgcagccagatatttaccctgtcgcgttatgcgggtatcttacgccgctgcttaaaggagaatgctatgtccgcccagaaaccggggttgcatccgcgcaaccgtcatcacagccgctacgatctcgccacgctttgtcaggtcaatcctgaactcaggcaattcctcacgcttacacccgccggggagcaaagcgtagactttgccaatccgctggcggtgaaggcgctcaataaggcgttgctggcccatttttacgccgtagcgaactgggatatccccgacggttttctctgcccaccagtaccgggccgggcggattatattcatcaccttgccgatttactggcagaagcaagcggaacaattccagcgaatgccagcattctggatatcggcgttggtgcgaactgtatttatccgctgattggcgtacatgaatatggctggcgttttaccggtagtgaaaccagcagccaggcgttaagcagtgcgcaggcgattatcagttctaatccggggcttaaccgcgccattcgtctgcgtcggcaaaaagagagtggggcgatttttaacggcatcatccataaaaacgagcaatacgacgcgaccttgtgtaacccgccattccacgattccgccgctgcggcacgggcaggtagtgagcgtaaacgccgtaacctggggctgaacaaagacgatgcactgaactttggcggccagcaacaggagttgtggtgtgaaggcggtgaagtcacctttatcaaaaagatgattgaagagagcaaaggcttcgcgaagcaggtgatgtggtttacaagtctggtatctcgtggtgaaaacttaccgccgttgtatcgtgccctgacggacgtgggcgcggtgaaggtggttaaaaaagagatggcccaggggcaaaagcagagtcgctttattgcctggacctttatgaacgacgagcagcgccgccgttttgtcaatcgccagcgttaaagcgttggttcccccggcggtaacggttcagccggggtcgcgcccggagcaggcagcacctgataagtctgcactggcgcgcgaacgcccgccaggtcgaaatgttttttcacctggctgtcgagggcaaagcgtaccgtccactgtttgagtggcagcgtggtgaagctaacacgcagtgtaaacgcggtattgcttaagccgacaatcccggcaaaattcggttcaccaataatcagcccgcgaatttcttcgttttccattaattccgctaccgcatctttcagtgcctgattggctttatcagcatcttcatggcgatcaacatcataatttgccaccacgctaccaatgccgcggacaaagttagcaaaggtggttatgctagaccacggaatgatgtgatacgccccggtatcctgtcgtacgcccacggagcgaatgctcatccgttccactgtgccggtcaacggcccgatagtcaccaaatctccagtgttcatgccgttttcaaactgaataaataccccggtgataatatctttcaccagcgtttggctaccaaagctgatagccagacctaatgccccggcacctgccagcaatggcgcgatattgacgccgatttcgctcaacacaatcatgatggtgatggtactgataatcaccgccagcgcgttacgaaacagcgtaagcagggtacgcgtgcgggcgctgggtagcgggcggccatgaatatcgctagccagccggttttcgatcaaactggcgagcaccgtccagccaaccgcgctgaagaaaagaatgagtgcgatacggatcaggatatctacggttttctgccccgcgccgttttgcagccagttccagaaatcgaacaatccccatgcgctcaacagcaacattaccgccacgcagactgtcagaatacgcgccgttttcagcgccgcgctcagccagccattcaaccgtttttgcagctccggatagttacgctgagtatgtgggctgagagtgatggttttcgccagccagcgggaaaacataccggaaacaaacgctgcgataccaataatcgccaggctgcgcaccgttgcacccatcataaatttcaggctgttgcccggatcgaacaagctaaagaaaaacagcacgataaaataggcgcttgccagccagtgccacaccagcgcaaaggcgcggataaacaggctgaaaaaggccaggctatgctccgcgaagttgagcaaatgctgggtaatctcttttttattacgaaagatcaggtacaacgcccagacggtcatgcacagcataatgatgacgttcgccagcgcacctatctgtacattcacctgattagagataatcggcacggccacaatcaggccataacctatcaaactgcttaaccagctcaggcgacgactccagtaacgggcgctctcgtcctgaatcgtgaacgggcgcagctccgccacgtttgggcaaaaaatcaggcgtagtacggctttgaaaaattcaatgagggcaaaggcgttgagaaacaaactttgttggaaagcgatggtgcgactgcctgcattcaggttgtcgcttaatacctggccgacaaataatgtcagggccagtaacagcaggtcgataataaacgccccgataatcatcgccggaagctgcaaccagttactgcgctcacgatttttttgccgcgcccactgacccattttgcgatacagcggcagtgcgcacaggcgaatcagccagtaaaaaccaaacactaataccgctaacatactaaaatgggtcagcgcattgctgaaggtttgtggattaaacggcttatgcggggagccggtgatattgcgataaagttgcccgaagcgggcggaaagggcttcaccataatggcggctgacttcggtgaccttttgcagcacggtttgctcttcgaccagcgtcggcggcactatttttggtaccggttcagcagggggcgtagcggcaacggtgcgcaactggtcgatcaactctttacggctggtgtcattatccagcacatccgccagtgcgccataggccgcttttttttgttcgatatccggttccggggccggttcagtcgtactgtccgttgtcgttgtggttgtaacgccgggtatggataccgcgtgggcaggtgcgcccagcaggcagaagaggatgaacaggatccaccgcatgactcctccagtgagaaaatagagcaaaaagataagtatagatgctggaggaggggcgattttaaatgagaggaatctggtgtgcctccctttcgggtgaaagggaggaagggatattaagcaggttgctgacaacgtgcgggcttttttgccggatgcggcgtgaacgccttatccgtcctacaagttcatgcaattttaataagttgccagatatcctgtaggcctgataagcgtagcgcatcaggcaatgtgtcttattaagagacgtgctgcaaaaattcctgcaagcgctggctcggcgggttcttgatcaacacctgcggattgccatcttccgcaatccggcctttgtcgataaagatcagccggctagctactttctcggcaaaaccgatttcgtgggtcacgatcaccatcgtcatcccttcttcagccagatcctgcataaccttcagcacttcatggcgcagttccgggtcaagagcggaagtcggttcatcaaacagcatcattttcggcttcaccgccagcgcgcgggcaatcgccacacgctgctgttgaccaccagaaagttcggaagggtagtgatgtgcacgttctgccagaccgactttcgccagcagctcacgtgccagtttttccgcctcttctttgttcgcgccacgcacgcgtagcgggccaaacatgacgttttccagcgctgtcagatgcgggaagaggtaaaactgctggaacaccatacctgcttcctggcgaatcaggcgctcgtcaactttcggatcgttaaccttcaggccatcgacaatcagatcgccggaggtgatttcttccagtttgttgatgcagcgcagcagggtgcttttaccggaaccggacggcccgataatcaccacgacttcgccctgggcaatgttcaaatcgatattgtgcagcacctgggttgggccaaagtgcttggagacgtttttaaattcaatcacaggattttcatccttctttccagacgacgcagaataaagctcagcaccagggtaataatcagatagaacaccgccacggcgctccagatctcaagggcgcggaagttaccggcaataatttcttgcccctgacgggtcagttccgccacgccgatcacaataaacaggctggtgtctttaatgctgatgatccactggttacccagcggcggcagcatacgacgcagtgccagcggtaaaatgacgtagcgaatggtttcccaacgactaagaccgagcgccagtcctgcttcacgaaaacctttgtggatagacagcaccgcaccacgcgtgatttccgcaatatacgcgccggagttgatcatgatggtgaccaccgccgcagtaaatgggtcgatgcgtaagtcgttaaacgccatcggcagggcgaaataaataaacatcacctggacgacgataggtgtgccgcggatcacttcaataaagaccagcgcgacgtggttggctatccaacctccgaaggtgcgtgcaaaacctgccagcaatccgattaccagaccgcctgccagaccgaggacgctaatccacagggtcattttggcaccttcaatcagaagcggaatggcaggccagatggcactccagtcaaactgcatatgttgttcctgttaccgtggtgtaaataatcaaattcagggtaattaatggccccggagcgggtttgcgcccctcaccctaatcctctccccataggggagagggaactgccagtgcgttttacaggtgtagcgttattatttcggttcagtaccgaaccattttttgtagatttcgttgtaagttccgttctcgcgcagggttttcaacgcgccgttgactttgtcacgcagctcgtcgctacctttcgggaacgcaataccgtattgctgcgcttccagagagtcacctaccgctttgaactgaccgttaccggcggttttgatgaagtacagaatgtttggcgtatcgtgcagaacggcgtctgcgcggttggtgcccagttccatataggcgttatcgatgttcgggaactgacgcagatctttagttttgatgtttgctttcgcgtaatcaacggagccagtaccgctcttcacagcaaccactttcccgtcgagatctttcacgcttttcacatcgttattgttagctttcaccatcactaacaggccgcttttgtagtagccgtcagagaaatcgatcgcttttttacgctcgtcggtgatggtaatgcccgccagcgccagatcgacgtttttggtttgcagtgccggaatgatcccactgaaatccatcggcttcagttcgtaatccagcttcagctctttagcgatggcagcccacagatcaacgtcaaagcccacatatttatcgccctgtttaaattcaaacggaacgaaggcggtatccgtcgcgacaactaattttttatccgcggcatgagaagaaaccgcaaaagccagggtcagtgcagccagactaacttttaatacagacttcatagcatttccttttttctatccacgggacgatcccctgcgtgacattcacatatatgaaaaaatcgtgccagttttgcaactccttgatttttcgagatgcggcaaaaacgtgatgcacgatttatagggcaataccctgaagatgcaccattctggggcaccaatctggtgcgctaaaattgtgcactcaacacagtgattatttagcgtaaaacctgatgaaaaaacaatctttatgtaacgattgtgtgatgatgtggatacaaaaaatttacttaatcagctggagatagcagatggatgcactaaataagtgcgttgaggtgggctgcaaaacaaaacggcctcctgtcaggaagccgcttttatcgggtactaaagttctgcaccatcagcgatggatttattcgatgttagactcgataaaccacaggaatttatccaggtcgcgagacgcggcggtcaggatatctgcggtgtcgtcatctttcgcttcgccaatcgctttgcgtacgtcattagcgacgattgcgtaacggtcagccagttctttcaggtgatcctgaacgttgtggatgtccagcgggtaacttttcagcggggttttgctgttgataacttgagtggtccccagagctacaccgcccagctgcactgcacgttctgccatggtatccagatgatcgatcagtgcggtgcggaagccatccagcatttcatgtacggcaatgaagttagcgccgcgcatgttccagtgcgcttgtttggtaatcaaagaaagatcaataaactggataacctggcgattcagcaactctactgttgcttttttctcgctgtcggagacatcgttgcgggtataaagcagattggtcgctttacttttaactaatttagcggtactcataatttcatatcctcttgatgttatgtcccagtaattaacgagattaagtatagcaccggctatgtgttccgctattctggctgttcctatcacactaatagtggtaacaagcgtgaaaaacaaaactaataaagattcaatgagttagatatattgataagaacaattcttatttatctgctcgccaggaattttcggaataaatatgcttttgcataattcgatatataaagacggtgtagaggaaaagtagcgagaaattctgcatggttatgcataaccatgcagaaatgtaaatttaattaatgtctaattcttttattttgctctctttgcgtactgtcagcgtagaccccatactagcggcgatgatagcgccgagcgccagtagctgtatgggtgtcagtgtttctccgaggaaaatcatcccggaaacggcagccagcgccggttccatgctcatcagcgtaccaaatgtccgtgttggcaaacgggtgagggcaatcatttccaggctataaggcagagcggtgctgagaatagcgacagccagacccaatggaataacgctccagtgccagagtgcttcaccagcctgaagcgctccaattggcacgaaaattaacgctgcaatcaagctaccaattgccaccgtcgcagggccatgttccgctcctgcgcgttgcccacttaaaatgtaaatagcccaacaagccccggcccccagtgccagcgcacagccggttaaatcgacatgggaaacgtcttgccccagcggtagcaggaaccacagaccaagaaccgccagcacaacccagacgaaatctaccgggcgacgagaagagaacagcgccaccgccagtggtccggtgaactccagcgccaccgcaatacccagcggtactgtctgaatagaaagataaaaaagataattcatcccacccaggctaacgccgtaaaacaacagcggtaaccgttgctctttggcaaagcgcagtcgccatggcttaaagaacgcgatgaggatcagcgttcctaatgccagacgcagcgcagtgacacccggtgcgcccaccagaggaaaaagactcttagctaagctggctccaccctgaatagacgccatggcaacgagcaatatgactattggtaaccagaccggcattttacgtaaactaccaggcatcctttctcccacaaatatctagacttaagtaaagcgtggagtgtactggatatacccaatgctggttgagcatttgttgaaaaaattttcccccgttttgactaaaatgcgccaggattgatggaatcattagtctggtgattaggaataatctggatgaatgacagggaaaacatgcgtaatacttacgcagttctctgaaaaagtgatttaaatttagatggatagcggtgtatggaaacgttctgttacatgaaatggcccgttagacatcacaaatcgcgaagagtttcccattaatttttgatatatttaaaacttaggacttatttgaatcacatttgaggtggttatgaaaaaaattgcatgtcttagtgcactggccgcagttctggctttcaccgcaggtacttccgtagctgcgacttctactgtaactggcggttacgcacagagcgacgctcagggccaaatgaacaaaatgggcggtttcaacctgaaataccgctatgaagaagacaacagcccgctgggtgtgatcggttctttcacttacaccgagaaaagccgtactgcaagctctggtgactacaacaaaaaccagtactacggcatcactgctggtccggcttaccgcattaacgactgggcaagcatctacggtgtagtgggtgtgggttatggtaaattccagaccactgaatacccgacctacaaacacgacaccagcgactacggtttctcctacggtgcgggtctgcagttcaacccgatggaaaacgttgctctggacttctcttacgagcagagccgtattcgtagcgttgacgtaggcacctggattgccggtgttggttaccgcttctaatcactttggtgatataaaaaatccgcctctcggggcggatttttgtttttaaggtttcgggtcgaaaatatcggttccgagatggttgtaatccaccttctgtaactggaagttggtgatgtatatcggcccggctttcttctcagatataaacgggtatttgatgttaatttccttcgctttaatccccgtccactgggagaaaaagcctaagaagtcattggcactgcggcgggctttaatcacacgatgcgctttatcgtcgctggaaatgaccataaaaggcacctggaaattttgctgatatttatcatcatgggcaaggtattgcacgtctttaccgcgctctttaaaggccagaccgtggtcagaaaagtaaaccaggctgaagctgctgccgctgttgcgtaactgatcgtacagcttgcgcagtaaatcgtccgtttgcgtcatggtatagagatagcagctcgtttctttgctttgcacaaaggtttcgtattttccttgtgtcctgtcgcaggcctgcggatgactgcccatcagatgtagaacaatcagctgcggttggctgtgctcttgcgccagcacttgagcggtcatatccagtaacgcttcgtctttggtgtttttatctgcttcaaaattaccttctttcaggaagtacacttcatctgctcgtttggcgatgctggcgatagcggtatcgtattcgccgatttgaccctggttggaaaaccaccaggtctggaagcccgcgcgatttgccagggtgacaaagttatcctgaaactgtggtttgccatcgacaacgcgattgagcgttaagccaaggcttttctgcgtggagccactggcggcaatgtagtcagcaaatatcaaaccgttaacgctgctggcaaacggggtattgtcccagtgaccgccaaaggcaccgagggcatcgcgacgcgcgctttcaccgatcaccaccacataggtctgatacttcggcttaacggcagtgaccgtccaggtatctttcattccggaaagttttgccatccgttcttgctcttcaatcacctcgttattattgacgatgacatccttagcaaaacgaaataccggatagccagtatctttcagtttaaatacgccaccccaggccaggttttgcacgggagcaacaaaaaatgtcgccacactgaataccagacacaggctgtcgaaggtattccagcgcgctttttcattctctttttttcgcctgattgctattacgccgagcgcaaaaataaataagccgaccaggtagctgtaccacggaaaaatcgtcaggatttcggtgctctcttccatattggtggagtgcaatgccagcaatgtattgaaattaggcgcgccgtaggcctgagcaaaagggaaataacaagccgccaccaggctactgacaccgaccagaactttttgtacgcgaggcaatgttcgccatagcaaaagcaaaatagccgtaaacgcagcggtgtagagcaaactgaaggggtaacctaagccgaggttaattaataggctctgtaaaaagtagaacgcagtccacgggctaaatacccggctacgggtaacaaggctttctttgagggttaaattcatatgccactatcgtaacaaacgccatgtgcttaccctggcgtcaagggtcaatacctgcaagagtgcgtgaagagtggaaaggggtccgcatccgcgagccgcaatatacgcagggctgcaagaagatagagcgagccgccgtagtggtcaactactgacgaacaaatcttttgcgaaggggattgcaaatccgacaaaaagtggggtttttcagaccaaaacgcgttatgcctgcatgaaagcaggagtgaagcggcgtaccgcgacgccgctatttatcggaaggtttatcttgctgcggtttgttgttgaccatatcgcacaacatagagagcagcattaaccgtactttaaagggagaatgactaaacacgcgcatacacctcttgaactcattcataagacctcctgacttgctaatcccgtcgatccttgaggggtgattgcattacatacagatatagcacaggctatattatatagctattgctaaaacgttaattttttgtaccttcgcaactctggtttacaatgtgcgcacgaaatgagaacgctatgtatgcgtcaccataatgaggaagcacaatgagtcgtcgcgcaggtacgccaacagcaaaaaaagtgacgcagttagtgaacgtggaagagcacgttgaagggttccgccaggtcagagaggcgcatcggcgcgagcttattgatgattacgttgagctgatttctgacttgatcagggaagtgggggaagctcgtcaggtggacatggctgctcgtctgggagttagccaaccgacggtggctaaaatgcttaagcggctggcaaccatggggctgattgaaatgatcccctggcgtggcgtgtttttaacggcagaaggagagaagctggcgcaggaaagccgcgagcgacatcagatagtcgaaaatttcttgttggtgttgggcgtcagtccggaaatcgcccgtcgcgacgcggaaggcatggagcaccatgttagtgaagagacgctcgacgcttttcgtttgtttacccagaaacacggtgccaaatgagcctgccttttttacgcacgctgcaaggcgatcgtttttttcagttattaattcttgttggtatcggattaagctttttcgtgccctttgcaccgaaatcctggcctgctgctatcgactggcacaccatcatcaccttaagcggcctgatgctgctgaccaaaggtgtggagttaagcggttattttgatgtgctggggcgcaaaatggtgcgccgctttgctacggagcgtcggctggcgatgtttatggtgctggcggcggcgctgctttctacctttctgaccaacgatgtcgcgctgtttattgttgttccgctgactatcacgctaaaaagactgtgtgagatcccggttaatcggctgattatttttgaggcgctggcagtcaacgctggtagcctactgacgccaattggcaacccgcaaaatattcttatctggggacgttctggtcttagctttgccggatttattgcccaaatggcaccgctggctggcgcaatgatgctgacgctcctgctcctgtgctggtgttgtttccctggaaaggcgatgcaataccatacgggggtgcaaacaccggagtggaaaccgcggctggtgtggagttgtctggggctgtatatcgtctttctgacggcgctggagttcaaacaagagctgtggggactggtgattgtggcggcaggctttgcgctgctggcacgtcgcgtggtgctcagtgtggactggacgctgctgctggtgtttatggcgatgtttatcgacgtccatttactgacccagcttccagcgttgcaaggcgtgttgggtaacgtgagtcatctatctgaacccgggttatggttaacggcaatcggtttaagccaggtgatcagtaacgtgccgagtaccatattgttgctgaactatgtgccgccgtctttattactggtatgggcggtaaacgtaggtggctttgggttattacccggaagcctggcaaatttgattgcgctacgtatggcgaacgatcgccgcatctggtggcgtttccatctctatagtataccgatgctgttgtgggcggcgttggtgggatatgttttgttagttatactcccggccaactaaggtctggcaaataaaaaaggcggattatgagtccgccttttgctttaagttttgaagattaattcagacgaaccggcatcccggagcggtttttaatcgcttcatcaagaacaacctggtcaacatctggctgaccggtcactgtctgcacgctcttcgtcagggtaattggcacaatttcctgaccttcaaactgggcttcggtggtagacagcgggttatggacttcaatataacggctgccgtctggctcggtggtcgcttttaccggctcatcaataaactgtacgcgggtaccgaccggtactttctcgaacaggaatttgatgtcttcgttacgcagacgcacacaaccatgacttacacgcaggccgataccgaagttggcgttggtgccatggatagcatacaggcgaccgatatagagtgcatacagccccatcgggttatccggacctgccggaacgacagccggaagcggttcgcccgcagcgcggtactctgcgtgcattttggcggtcggcgtccaggtcgggcctgcttttttacgctcaactttggtggtccagttgataggcgtatctttgcctaactgaccaatgccgatcggcagcacgataacggtgttggtccctttcggatagtaataaagacgcatctcagcactgttaatgacgatgccttcatgaacggtatccggcaggatcagctgctgcggaatgttcagtacagtaccgcctttcggcaggaaggtatccacacccgggttcgcttccatcatattggaaagccccatctggtactcggcggcaaaatactccagcggctgagtgttaccttcaggaatggtgatcacctgattctgaccaaccaggcgactcccgtcggttggcagaggataagttaccgcagaggcggtactgcaaaagccgacaacagcgaaggccgctgcgaataatgttttcaatttcatattcatgttaagcgagattttgtgcctggcaggccattgggttgagaatattagagtattggaagcgcattataagttcattccagctcacagtgaaatcagatgtgtacgaaatcacattttttgcctttggcttgagtgtagaccttaagcgaggagcaggatcttctttcagacttatggcataatgcgcggtttgtcatatctcttttcaggatacgcctgtgttagtttccagtaacgtcaccatgcagttcggcagtaagccgttgtttgaaaacatttccgtcaaatttggcggcggcaaccgttacggcctgattggcgcgaacggtagtggtaaatccacctttatgaagatcctcggcggcgaccttgagccgacgctgggtaacgtttccctcgatcccaacgagcgcattggtaaactgcgtcaggatcagtttgcctttgaagagttcactgtgctggatacggtgatcatggggcataaagagttgtgggaagtgaagcaggagcgcgaccgcatctatgctttgccggaaatgagtgaagaagacggctataaagtggccgatctggaagttaaatacggcgaaatggacggttactctgcggaagctcgcgccggtgaactgttgcttggcgtgggaattccagtggaacagcactacggcccgatgagtgaagttgctcctggctggaagctgcgtgtgcttctggcgcaggcgctgtttgctgatccggatattctcctgctcgacgaaccgaccaacaacctcgacatcgacaccattcgctggctggaacaggtgctgaacgagcgtgacagcaccatgatcatcatcagccacgaccgtcacttccttaacatggtctgtacccacatggcggatctggattacggcgagctgcgcgtttatccgggtaactacgatgagtacatgacggcggcgacccaggcgcgtgaacgtctgctggccgataacgccaagaagaaagcgcagattgctgagttgcaatctttcgttagccgctttagcgccaacgccagcaaatctcgccaggcaactagccgcgcgcgccagattgataaaatcaaactggaagaggtgaaagcctccagccgtcagaacccgttcatccgttttgaacaggataagaaactgttccgtaacgcgctggaagtggaaggtctgaccaaagggtttgataacggtccgctgtttaaaaatctcaacctgctgctggaagtgggtgaaaaactggcggtactgggtaccaacggcgtcggtaaaagtacgctgctgaaaacgctggtgggcgatctgcaaccggacagcggcaccgtaaaatggtctgagaacgcgcgcattggttactatgctcaggaccacgaatatgagtttgaaaatgatctgaccgtgttcgaatggatgagccagtggaagcaggaaggcgatgacgagcaggcggtacgcagtattctcggtcgtttgctgttcagccaggacgacatcaaaaagccagctaaagtgctttccggtggggaaaaagggcggatgctgtttggtaagttaatgatgcagaagccgaacattctgatcatggacgaaccgaccaaccacctggatatggaatccattgagagcctgaacatggcactggaactgtatcagggcacgctgatctttgttagtcacgaccgtgagttcgtaagctccctggcgacccgcattctggaaatcaccccggaacgcgtgatcgactttagcggtaattacgaagattacctgcgtagtaaagggatcgagtaagtgattatccgtcaccccgatactgtcggggtgacggcggctgatgacaaatgcaaaatagcctgatgcgctacgcttatcaggcctacgcagtacctgcaatatattgaatctgcaggactttgtaggccggataaggcgttaacgccgcatcaggcattaacaaagcgcatttgtcagcaatctgagtaacgtcgaatcgattttcttaatcccacatcaattcacttccattaattctcaaacatccatgcccaacgctcgcttaccgtgaatgttgaggtcggcaagcgtaaagcgtccttcccagtttgtttcatagtcctcgcgcgggaagtcgcccgggcttgcgcctttttccagtgcggccttcaccttgtgcgcgtaggcaagatttttctcgcacatcggtgccgcaggaatgtacatcacgttgccccaaccttgttgattttcaacgggggcaacggaatggatgacgtcgcagtgccaccagacggagtctccggcttcgagttttggaatgctggttaacgcctcaatcaacagtggatgccattgctcacttaccggcaatactcttccgggcgctacgccgcacagttcatcctccggcacatcatcaagcagcggacgtaacagtacgtacgccatagcttcaggaatgggcacgacgtgcagcagcccctgaccaggcagcatatcagagagcgctgtccagccctggaatgtccgaaacacggaacatttggtggtgttgtccaccgtgtactcttcaacttccgtacgatgtgccgcatgccagggatcatattgcgccagattgccattaaagacgttggcgaaaacgcgctgatacgctggaagcagccagcgttccagtgccccggagtcggtatgcgctccaagacctttggaggtcgttccgggcggacggcggcggatacggtcagggtagatgacgctcacatccgggttaaaccattgctttccatcactttcaaatgtccacagacgattgagaaagctctgcgcattcgccatttcttcactctggcgggcctgcatttgcgcctggctccagtagatggggtaaatctcgggacgactagcgctgagcgtcccgaagaaattatcgccggggcctttgtagacctcgtcaaagcggttgcggtccagatagtccagcatgctctgatcccagcctagcgcttgttcgcgggggaaatggccttttatcaccgcacaaccgcgacgtttaatctgttcgcgctgctctgcagtaacatgacctgctttgatatcggcataagacagcaccggccagacggcatcgccctgtgctttgagtgcgttgatttcagccactcgcgtggcaatgtcatcgcttagctgattaaagatctgctggacgtcgccaagctgcgcccgcagcgcgtgcttcatctgacggatagctgctttgtgatcggcaggcaatgtgtcgctggtaaaagtagaagccataaccacctctcattaactttcattcgaaaccattctgatttgcatgtgacaatataagttataaataagttaatgcaagtttaatgatttgatgtgatgtacaggatgtaaaaagaagggaaaaccggagcgcacggctccggtagagaggtcagctgttaaaaggggatgtgttatccagcaccgcctgaatcacattcagcgcgccttcatgattattatcatcggtagcgtaacgggcgatttgtttaatgttttccgcagcattgcccatcgcaaaggaataacgcgccattttcagcatctccgcatcgttaccgctgtcgccaatcgctaccacattttgcggactcagatcccagcgtttcagtaaccggctaataccgtttgctttatgtagaccgggaataatcaggtcgataaagccaaaaccactggtaacgggtttcataatgccatcgagcgctacgtgcagtttgtcgatcactaacgggatttgttcatccggcaggttgaggctaaacttgaacagtacgtcgtcaatctcctgataatcttttacaggtttcaggcgatggtagtgttttgccatcagtgcgacaaatgcttcgggggcattttcgctgacatatgcactttgcagaccgcaggcgacaaaattgagttgcttatcttttagcaactcgccaataacaatccggctttcatgtcgggtcagttcgccgtggaacaactgcttgccatgttcgtaaaccagtgcgccgttttccgcgacaaaagagatctcatcctttagctcaggaaagaaactaataagctggtaatactgattaccgctggcaacaacgaacttaatgccgcgctttttcagttcctgatattgcgccataaaacgtggttggttgtacgttttggcgtcgttaagaaaagtaccgtccatgtctgtgacgataacttttacgctcataggtgtgctcctggctcgaaaatgaaaccgtaacagtgtaataacaatgtgacgcagagcacaaattatatttcgaatgaaagtaaggatgaaattgatgatgtgaatgatttagcccggcgacgacgccgccgggccgaggagattacagcatatgttcagtacgggcgatgatatcgtcctgagcgtctggagagagcgcggtgaagaacgcggaatagcccgcgacacgcactaccagatcgcgatactgatcgggatgttttttcgcatccagcagcgtttcgcgggaaacgatgttgtactgaatatgccagcctttatgcacttcaaagaaggtacgcagcaggatcatcagtttctgcttgtcagattcgttctccagcgttgccggattcagtttctggttgagcaacacgccgccgagaatcgctgccgtaggcagtttacccacactgccaatgaccgcagtagggccaagatggtcagtaccggaggccgggcttgcgccttctgccagcggggtgtgggctttacgcccgtccggtgttgccatagtctgcgcgccaaacggtacgttagcggagatactactcgtacccgcgtaatagttgccgccaaccggaccacgaccgtagcgcggattatggtactgtttcagttcgtcgatataggtctgataagcgcgagccagcagcgtatcgacagtatcatcgtcgttgccgtacttcggcgcaccgttaatcagccgctgacgcagctgctcgtgagtcaggccgtcgaagtcatctgccagtgcggcagcaagctgttgctgaccaatcgcaccttgttcaaacaccagtttcttcactgccgccaggctgttgccgaggttggcaatgccgacctgcaggccagaaacccagtcatatttcgcgccgccttgcttgatacttttcgctcgctcaatacagtcatccaccagcgcgctgcagagaatatcgtgcacgttctcttccagcatggtgtcgacgacatattcgatttcgatacttttgcgggtgtagtaacggatttgcgtatcccacgcgtccatcacttcatcgaagttgttgaagttacctgcgctcaacgctttttcttgtggcaggaacactttgccgctggtggcatcatgcccgccttccagcgccgccagcatcacgcgggcgaagttgataaagctcatgccggtacagcgatagccccatttgccaccgacggcggtttctatacaaccaatcgctgcgtagtcataagcgtcctgcggttcaataccgagtttaataaattccgggatcacgatttcgtcgttgttgaacgccggcatcccgaagccgcaacggatcacctgtacgcaggcgtcgaggaaatcgttgctcattcctgcatggtaacgcacgctgaggttaggctgagtggaacgcaggcgaccgcaggattcgaggatcgcgtaagagagtggattcaccgcgtccattggttgaccatcaaccagattttgcccgccaatagtgacgttctgatacagcggacttcccgcagaggctttactgtgactgccggagcggatcttgttcacttccagcagtttcagccagcagctatgcagcatctcgatggcgtgttcgcgatccagcgtctggttgagttcaacgtcgcggcgatagtacgggtagagatactggtccatacgaccaaagcttacactgtgaccgttagattcgatctgcaaaatcaactggatgaagtaacacagttgcagcgcctgccagaaagtctgcggcggctggtgggcgataagatcgcagttttctgccatcgccagcagttcatcgcgacggctttcgcgggtttcggtcgcggccatttcacgcgccagggcagcgaaacgttcaatgtgttcactgactgccaccagcacgatatcaatcgctttcaggaattgctcaccgtgtaaatcttccagcaccgtcaggttgatgcggctgcgacgttccgctacttcctcgcgcagaccatcaagccctttttccagcagcagcgggaaattcaccgccaggtgcgcatcgccggaggtcatattgccttccgctttaatgattccggtcgccagcagacctttttgctcatcggtaaacatgccgtagcagcgatcctgtacggtctgaccgcgccaccacgggcacacttcatgcagaacgcgtttgttctcttcgctcaccgcaaagccagcaccgggacgatctgccagatcatcaatctctttttcgatccagctgacagtatattccgggaagatcggcgcggcgcgaacttcgcttgcctggttgccaatgatcaactcatcgtgtttgatccagatggtgcgattcgccaggtgatgcgccagtgccagcgcgcgacgtaccgggatcggcttatcgagatgttgttgatacatctcggtatagtgctgcgcgcgctcggtacagactggcggtttcacaatatgcaccagcgcatttttgtgcgctttaatgcggtcgctgagcgtgtccagtttcagtgtggtcatggttgttatcctcgtaaggtcgcggttaaccctttctggcaggcatactgctgggcaaagtcgagcagttctggcgcatcaagcggtttttccggggcgtcatagggcagattaagtaagtgatatttgttgatgcccagcgtgtggtagggcagaaaatgaatttcgccaacgtgcagctcgtcggcggcaaaatcggtaatggcttttacagaggtttcgtcggcattaaagccctgaatcagcggcacgcggataatgatttttttgcccgctgcggcgagttttttcaggttatccagcactctggcggcgttaccgtcggtccactgtttaaacggcgcgtcggcaacgtgttttaaatcggcaagaaacagatcgatatagggcagagaaggggcgatatatttccacggcacatgcagacaggtttctaccgcagtatgaatgcctgcctcgtggctggcttgcagtagcgccatcgccatttccggctgcataaagggctcaccaccgctaagcgttaaaccgccgccgctgcgatcgtaaaacggtttatcgcgcagaacggtcgtcatgatctcctcaacgcttttcacttcaccacacacggttaatgcctgtgtcggacagcagtcggttaacgccgtcagatgctccggggttaacttttcccgatgaataagcaaaccattcagcgcgcgctcaatcacttccggcgcggccttagcgcacagctcgcagccttccagacacagtcgtgcgtcatacagcagatcctgcgtgcgggcgcggctttccgggttctgacaccagcggcagcccaggctacagcctttaagaaatacgaccgtgcggataccggggccatcatgggtgctgtagcgctgaatattgaaaatcatagttgcctctctatttcgttcaagcattaaaatactttcgaatgaaagttagattgatgtgcgtcaactgttcagagagttttcccgtgatagtctacattcagacaaaaagtacattttgaggatggttatggaactgtatctggatactagtgacgttgttgcggtgaaggcgctgagtcgtatttttccgctggcgggtgtgaccactaacccaagcattatcgccgcgggtaaaaaaccgctggatgttgtgcttccgcaacttcatgaagcgatgggcggtcaggggcgtctgtttgcccaggtaatggctaccactgccgaagggatggttaatgacgcgcttaagctgcgttctattattgcggatatcgtggtgaaagttccggtgaccgccgaggggctggcagctattaagatgttaaaagcggaagggattccgacgctgggaaccgcggtatatggcgcagcacaagggctgctgagcgcgctggcaggtgcggaatatgttgcgccttacgttaatcgtattgatgctcagggcggtagcggcattcagactgtgaccgacttacaccagttattgaaaatgcatgcgccgcaggcgaaagtgctggcagcgagtttcaaaaccccgcgtcaggcgctggactgcttactggcaggatgtgaaagtattactctgccactggatgtggcacaacagatgattagctatccggcggttgatgccgctgtggcgaagtttgagcaggactggcagggagcgtttggcagaacgagcatttaaccggacgttctgcatcctcataaattgctgatgacgtggcggagtgccgcgtcttatcaggcctggaggtggcaattactgcccacacacctcacaccccggattacgcatcagtttcatttcgcgaaactgacaggtcatcgcatcgtacatgacgattttcccgctggccggtttgccataacctgccagcattttgatcgcttccattgcctgcaagctaccaattacgccgatcaacggtgccattacgcctgcttccacgcaggttaatgcattttcaccaaacaaacggctaaggcagcgatagcacggttcaccgtcctgataagtaaagacggtgatttgaccttccatacgaattgccgcgccggaaaccagcggtaccttcgcggcaaaacagcctgcgttcagttgattacgtaccgcaacgttatccgtacagtcgagcaccagatcgtgttcagcaatcaatgctgcaagttctgcgtcatccagcagtgcattgactggcgtaatcgcgatatgtgggttgatccgcgtcagggcgtcacgggcggattccaccttcggttgcccgaccgtggcatcactgtgcagtgtctggcgttgcagattgctgaggctaaccgtgtcgaagtcgagcagcgtcaggttaccgacaccggcgcttgccagatactggctggctgcacagccgaggccgcccaggcccactatcagcacgcgagaatctttcagcgcctcctggccgtcaaaatcaaagccgcgcagaatgatttgccggttgtagcgcagcatctcctgatcgctgagttccgccattacaggcctccgaacaacgcgttaaacggttctacttccacccattcgcccacttccacattgccgcgatcgcgttccagcacgataaagcagttgccgaggctaaaggagctaaatatatgactaccctgatgtccggtggtcgtcacttccagttcgccatcggcgttgcgttgcagcacgccgcgctggaaatcaagacgtcctggcgtttttttcaggcgggacgctgtgcgtacgcgctggcgcgcgggcaggccgctggcggtgttaccgcttagttttgccagcaaaggctgtaccagttgatagaaggtcagcgtcgcactaaccgggttgcccggcaggccgcagaaccagctattgctgagtttaccgaacgcgaacggtttacctggtttaatcgccagcttccagaaggcgatctcccccagctcttcaagaatcgttttggtgtaatccgcctcacccacactaacaccgccggaactgatcaccacatccgcctggctgtcggcttcaataaatgcggcgcgcagggcatggggatcgtcgcggataatccctaagttaattacctcgcatcccaactgttctaacatcaggtgtacggcgagacggttggtatcgtagatttggccgtcgcccagcggctgaccgggcaactggagttcatcaccggtagaaaaaagcgctacacgcactttacgaatcaccggaacttcggcaatccccagactagcaattactggcagctctgcggtagtcaggcgagttcccgccgggaaaacaaccgcacctgcagagatatcttcaccgcgacggcgaatattttgcccgctacgcacttcagcagtaaaacgcacgccattgtccatttgttcagtctgctcctgcatcaccaccgcttcgcagccttccggcaccggcgcaccggtcataatacgaatgcaggtacccgcaggccattcaccatggtatggctgaccggcaaaggatttaccggcaacgggcagcggttgcccggaggcaatatcggctaaacgcaccgcgtagccgtccattgcggagttatcaaaccccggaacatcaagcgggctaacgacatcgctcgccagaatacgaccaaaacactgtaccagtggcagcgtttcctgggcggtcagtggggtgacgcgagaaagcatctcattaagcgcggtgtcgaggctcatcaatccggtggtaaattccatgaaaacactcctgcggaggcaaaatcgaatttgcctattatgtcagaaaaacgccacagactgtatgccacctcgggcgtagcgctgggtcctgcctttacatgccatatccatctttctatattcaaaaattgaatgagtaattcataaaaattctgatatttatagcaaaagtggcgaaccacccttaatggacgaatactatgggcaaagcagtcattgcaattcatggtggcgcaggtgcaattagccgcgcgcagatgagtctgcaacaggaattacgctacatcgaggcgttgtctgccattgttgaaaccgggcagaaaatgctggaagcgggcgaaagtgcgctggatgtggtgacggaagcggtgcgtctgctggaagagtgtccactgtttaacgccggaattggcgctgtctttacgcgtgatgaaacccatgaactggacgcctgtgtgatggatggtaacaccctgaaagccggtgcggtggcgggcgttagtcatctgcgtaatccggttcttgccgcccggctggtgatggagcaaagcccgcatgtgatgatgattggcgaaggggcagaaaattttgcgtttgctcgtggcatggagcgcgtcagcccggagattttctccacgtctttgcgttatgaacaactactggcagcgcgcaaggaaggggcaaccgtcctcgaccatagcggtgcgccactggatgaaaaacagaaaatgggcaccgtgggggccgtggcgttggatttagacggcaatttggcggcagccacgtccacaggcggaatgaccaataaattacccggacgagttggcgatagtcccttagtgggtgccggatgctacgccaataacgccagtgtggcggtttcttgtaccggcacgggcgaagtcttcatccgcgcgctggcggcatatgacatcgccgcgttaatggattacggcggattaagtctcgcggaagcctgcgagcgggtagtaatggaaaaactccctgcgcttggcggtagcggtggcttaatcgctatcgaccatgaagggaatgtcgcgctaccgtttaacaccgaaggaatgtatcgcgcctggggctacgcaggcgatacgccaaccaccggtatctaccgtgaaaaaggggacaccgttgccacacagtgatgaacttgatgccggtaatgtgctggcggttgaaaatctgaatattgcctttatgcaggaccagcagaaaatagctgcggtccgcaatctctcttttagtctgcaacgcggtgagacgctggcaattgttggcgaatccggctccggtaagagtgtgactgcgttggcattgatgcgcctgttggaacaggcgggcggtttagtacagtgcgataaaatgctgttgcagcggcgcagtcgcgaagtgattgaacttagcgagcagaacgctgcacaaatgcgccatgttcgcggtgcggatatggcgatgatatttcaggagccgatgacaagcctgaacccggtatttactgtgggtgaacagattgccgaaagtattcgtctgcatcagaacgccagtcgtgaagaagcgatggtcgaggcgaagcggatgctggatcaggtacgcattcctgaggcacaaaccattcttagtcgttatccgcatcaactctctggcgggatgcgccagcgagtgatgattgcgatggcgctgagttgccgcccggcggtgctgattgccgatgagccaaccaccgcgctggatgtcactattcaggcgcagatcctgcaattaatcaaagtattgcaaaaagagatgagcatgggcgttatctttatcactcacgatatgggcgtggtggcagagattgccgatcgggtactggtgatgtatcagggcgaggcggtggaaacgggtaccgtcgaacagatttttcatgcaccgcaacatccttacacccgtgcgctgttagctgctgttccgcaacttggtgcgatgaaagggttagattatccccgacgtttcccgttgataagccttgaacatccagcgaaacaggccccccccatcgagcagaaaacggtggtggatggcgaacctgttttacgagtgcgtaatcttgtcacccgtttccctttgcgcagcggtttgttgaatcgcgtaacgcgggaagtgcatgccgttgagaaagtcagttttgatctctggcctggcgaaacgctaagcctggtgggcgagtctggcagcggtaaatccactaccgggcgggcgttgctgcgcctggtcgaaagccagggcggcgaaattatctttaacggtcagcgaatcgataccttgagtcccggcaaacttcaggcattacgccgggatattcagtttatttttcaggacccttacgctagcctggacccacgtcagaccatcggtgatagcattatcgaaccgctgcgtgtacacggtttattgccaggtaaagacgcggctgcacgcgttgcgtggttgctggagcgcgtgggcctgttacctgaacatgcctggcgttacccgcatgagttttccggcggtcagcgccagcgcatctgcattgctcgcgcgttggcattgaatccaaaagtgatcattgccgacgaagccgttagcgcgctggatgtttctattcgcgggcagattatcaacttgttgctcgatctccagcgtgatttcggcattgcgtatctgtttatctcccacgatatggcggtggtagagcggattagtcatcgtgtggcggtgatgtatctcgggcaaattgttgaaattggtccacggcgcgcggtcttcgaaaacccgcagcatccttatacgcgtaaattactggcggcagttccggtcgctgaaccgtcccgacaacgaccgcagcgtgtactgctgagcgacgatcttcccagcaatattcatctgcgtggcgaagaggtggcagccgtcagcttgcaatgcgtcgggccggggcattacgtcgcacaaccacaaagtgaatacgcattcatgcgtagataacattcaggcggagaataaaatggcaagagctgtacaccgtagtgggttagtggcgctgggcattgcgacagcgttgatggcatcttgtgcattcgctgccaaagatgtggtggtggcggtaggaagcaatttcaccacgctcgatccgtatgacgcaaatgacacgttatctcaggccgtagcgaaaagcttttaccaggggctgttcggtctggataaagagatgaaactgaaaaacgtgctggcggagagttataccgtttccgatgacggcattacttacaccgtgaaattgcgggaaggcattaaattccaggatggcaccgatttcaacgccgcggcggtgaaagcgaatctggaccgggccagcgatccggcgaatcatcttaaacgctataacctgtataagaatattgctaaaacggaagcgatcgatccgacaacggtaaagattaccctcaaacagccgttcagtgcgtttattaatattcttgcccatccggcgaccgcgatgattagtccggcagcgctggaaaaatatggcaaggagattggtttttatccggtgggaaccggaccgtatgaactggatacctggaatcagaccgattttgtgaaggtgaaaaaattcgcgggttactggcagccaggattgcccaaactggacagcataacctggcgtccggtggcggataacaacacccgcgcggcaatgctgcaaaccggtgaagcgcagtttgctttccccattccttacgagcaggccacactgctggagaaaaacaaaaatatcgagttgatggccagtccgagtattatgcagcgttatatcagtatgaacgtgacgcaaaagccgttcgataacccgaaggtccgtgaggcgctgaattacgccattaaccgtccggcgctggtgaaagttgcctttgcgggctatgcaacgccagctactggtgtggtaccgccaagtatcgcctacgcgcaaagttataaaccgtggccttacgatccagtgaaagcgcgcgaattactgaaagaggcgggatatcccaacggtttcagtaccacgctgtggagcagtcataaccacagcaccgcgcagaaagtgctgcaatttacccagcagcagttagcgcaggtcgggattaaagcccaggtgactgcgatggatgccggacagcgggcggcagaagttgaaggtaaagggcaaaaagagagcggcgtgcggatgttctacactggctggagcgctagtaccggcgaagcggactgggcactaagcccgctgtttgccagccagaactggccaccgacgctgtttaataccgcgttttacagcaataaacaggtggatgacttcctggctcaggcactgaaaactaatgatccggcggaaaagacccgcttatataaggcggcgcaggatatcatctggcaagaaagcccgtggatcccgctggtggtagaaaaactggtgagcgcacacagtaaaaacctgaccggtttttggatcatgccagacaccggcttcagctttgaagacgcggatttgcaataagcaacgcagggagtggaatgcttaattacgttatcaaacgcttactggggttgattccgacgctgtttatcgtcagcgtgctggtgtttttatttgtccatatgctgcccggcgatccggcgcgattgattgccgggcccgaagctgatgcgcaggttatagaactggtgcgtcagcagctggggttggatcagccgctgtatcaccagttctggcactatatcagcaatgctgtgcagggggattttggcctgagcatggtgagccgtcgtccggttgccgatgagattgccagccgctttatgccaacgctgtggctgaccataaccagtatggtctgggcggttatatttggtatggcggcgggaattatcgccgccgtctggcgtaaccgttggccggatcgattgagtatgaccattgcggtgagcgggatcagctttccggcatttgctctggggatgcttttaattcaggtattctccgttgaactgggctggctgcctaccgtgggagcagacagttggcagcactacattttaccctccctgacgctcggcgcggcagtggccgccgtgatggcgcgctttacccgcgcgagctttgtcgatgttttaagcgaagattatatgcgtaccgcgagggcgaaaggggtgagcgaaacctgggttgtcctcaaacacgggctacgtaacgcgatgatcccggtagtgaccatgatgggcttacagtttggctttttgctcggtggttccatcgttgtggagaaagttttcaactggccgggacttggacgcttactcgttgactccgtagaaatgcgtgattacccggtgattcaggcggaaattctgcttttcagcctggaatttattcttatcaacttagtggtggatgtgctttacgccgccattaacccggctatcaggtacaagtaaggatgcgactatttaactggcgacgtcaggcggtgttaaacgccatgccactggtcaaacctgaccaggtacgtacaccgtggcatgaattctggcgacgatttcgccgtcagcatatggcgatgaccgccgcattattcgttattttattgattgtggtggccatttttgcacgctggatcgctccctatgacgccgaaaattattttgattatgacaatctgaataacggaccttctttgcagcactggtttggcgtcgatagtctggggcgtgacattttcagccgtgtcctggttggtgcgcaaatcagcctggcggcgggcgtgtttgccgtgtttatcggtgcggcgatcgggacgttgctgggcttgctcgctggatattatgaaggctggtgggatcggctgatcatgcgcatttgcgatgtgctgtttgccttcccgggtattttactggcgatcgctgttgttgcggtgttgggaagcggcattgctaacgtgattattgcagtcgccattttttccatccccgcgtttgcccgcctggtgcgcggcaacacgctggtgttgaaacagcaaacctttattgagagtgcacgcagtattggtgccagcgatatgaccgttttgttgcgtcatatcctgcctgggaccgtctcttctatcgtggtgtttttcaccatgcgcattggtaccagcattatctctgccgccagcctcagttttctcggcctcggtgcgcagccgccgacaccagagtggggagcaatgctcaatgaggctcgagcggatatggttatcgcgccgcatgtcgctgtttttccggccctggctatttttctgaccgtactggcgttcaatttgttgggcgatggtttacgcgatgcgctggatccgaaaattaaaggataattacgtttgaatattgcttgaaagggtaatcacctcacaggaaattattgccctaagcaagtgttgtaactttctgctgattttgtagaatcgggtaatttggttaaaaagccgcagcaagggacaatttttgcagcggcacagcgttcagatagttattttgttaaatgtattaacatgctgagtttatacgaaaagataaagataaggctgataattttatttttattggcagcactgagttttattggtctttttttcatcattaactatcaactggtaagcgagcgcgcggtaaaacgtgccgatagccgctttgaacttattcagaaaaacgttggctatttctttaaagatattgaacgtagcgccctgacattaaaggacagtctgtatttattaaaaaatacagaggagattcaacgcgccgtgattcttaaaatggaaatgatgccatttttagacagcgtgggactggtacttgatgataataaatattatctttttagccggagggcgaatgataaaatcgttgtttatcatcaggaacaagtaaatggaccgcttgtcgacgagagtgggcgggttatttttgccgattttaacccaagcaaacgaccgtggagcgtggctagtgatgactctaacaacagctggaatccggcatacaattgctttgatcgtccgggtaaaaaatgtatctcttttacgctacacatcaacggcaaagatcacgatttgttagcggtggataaaattcatgtcgatttaaactggcgatatctgaacgagtatcttgatcaaatcagcgctaatgatgaagttctatttttgaaacaaggccatgagatcattgccaagaatcaactcgctcgtgaaaaactgattatttataatagcgaaggtaattataatattattgattctgtcgatactgaatatatcgaaaaaacaagtgcggtgccaaacaacgcattattcgaaatctatttttattatcctggcggtaatttattgaacgcaagtgataaacttttttatctgccgtttgcgttcattattatcgtattgctggtggtttatttaatgaccactcgtgtgttccgtcggcaattttctgaaatgacagagctggttaatacgctggcgtttttgcctgacagtacggatcaaatcgaggctctgaaaattcgtgaaggcgatgcgaaagagattatcagcatcaaaaatagcatcgcggaaatgaaagatgccgaaattgaacggagtaataaattgctcagtctgatctcttacgatcaggaaagtggttttattaaaaatatggcgattattgagtctaacaataatcagtatctggctgtggggatcatcaaactgtgtggtctggaagccgtggaagcggtgtttggtgttgatgagcgcaataaaatcgtcaggaaattgtgtcagcgaattgccgagaaatatgcgcaatgctgcgatatcgtgacattcaatgccgatctctatttacttctgtgtcgggaaaatgtacagacatttacccgtaaaatagcgatggtaaacgattttgacagcagctttggctaccgcaatctgcgcatccataagtctgccatttgtgaacctttgcagggggaaaacgcctggagttacgcagaaaaactgaaactggcgatttccagtatccgtgaccatatgttcagtgagtttattttctgtgatgacgcgaaactcaacgaaatagaagagaatatctggattgcgcgtaatattcgccatgcaatggaaattggcgaactattcctcgtctatcaaccgatcgttgatattaacacccgcgccattctgggcgcggaggcgttgtgccgttgggtgtctgcggagcgggggatcattagtccgctgaagttcattaccattgctgaagatatcgggtttatcaatgagctgggttatcagattattaaaacggcaatgggtgaattcagacattttagtcagcgtgcgagcctgaaggatgatttcttactgcatattaatgttagcccctggcagttaaacgaaccacactttcatgagcgttttaccaccatcatgaaagaaaatggcctgaaggcgaacagcctctgtgttgagatcactgaaaccgtgatcgagcgaattaatgaacatttttatctcaatattgaacaactgcgtaaacaaggggtacggataagcattgatgactttggcaccggtttgagtaacctgaaacgtttttatgaaattaatccagacagcataaaggtggacagccaattcaccggcgatattttcggtactgcgggaaaaattgtgcgcattattttcgacctggcacgctataaccggatcccggtgattgcggaaggcgtagagagcgaagacgttgcgcgcgaattaatcaaattaggatgtgttcaggctcaggggtatctgtaccagaaacccatgccattctccgcctgggataaaagtggaaaattagtaaaagagtaatttacgtatgtccagaatcaataagttcgtacttacagtcagtctgctgatttttatcatgattagtgcagttgcctgcgggatctacactcaaatggtaaaggaacgggtgtatagcctgaaacagtccgttattgatactgcttttgcggtggcaaatattgctgaatatcggcgtagcgtggcaattgatcttatcaacacgctaaatcccacggaggaacagctgttggttggtttgcgcacagcttacgccgacagcgtttccccctcttatttgtacgatgtcggtccttatctgatttccagtgacgaatgtattcaggtaaaggagttcgagaaaaattattgtgcagatattatgcaggttgtgaagtatcgacatgtcaaaaatacagggtttatctcttttgacggtaaaaccttcgtctattacctctatccggtaactcacaatcgtagtctgatatttttgcttggtctggagcgtttttctttactgagtaaaagcctggcgatggacagcgagaacctgatgttctctctatttaagaacggtaaaccggtgaccggtgatgaatataatgctaaaaacgccatcttcaccgttagcgaagcgatggagcacttcgcctatttgccgaccggattgtatgtatttgcgtataaaaaagatgtttatttgcgggtttgtacattgattattttctttgccgcattggtggcagtgataagcggtgccagttgcctctatctggtacgcagagtgattaatcgtggtattgtggagaaagaagccatcattaataaccattttgaacgcgtactggatggcgggcttttctttagcgctgccgatgtcaaaaaactctacagtatgtataacagcgcgttcctggacgacctgaccaaagcaatgggcagaaaatcctttgacgaagatttaaaagcgctgccggaaaaaggcggttatttgtgcctgtttgacgtcgataaattcaaaaacattaacgacaccttcggtcatttgctgggcgatgaagtgttgatgaaagtggtgaaaatccttaaaagtcagatcccggtagataaaggtaaagtctaccgcttcggcggtgacgaatttgcggtgatttatacgggtggaacgctggaagagttgctaagcattctaaaagaaatcgttcatttccaggtgggaagcattaatttaagtaccagtatcggtgtagcacatagtaatgaatgtcctaccgtcgaacgcttgaaaatgctggcggatgagcggctgtataagagtaagaaaaacggcagggcacagattagctggcagtaatcattattcgcaggccggacaaatgattttgcccggcctgaattaattaaacccggctaccccacaaatcgtactcatcggcgtgctcgactttcacacgcaggatatcacccggcttaacgttggtttcaccattgagataaaccgcgccgtcgatttccggtgcatctgccatgctgcgaccaatcgcgccttcttcgtccacttcgtcgataatcaccagaatttcacggcccactttctcttgcaggcgctcggcggaaatctgctgctgcagctgcatgaaacggttccagcgttcttctttaacttcttccggaacctggtcaggcagggcattggcgtctgcaccttcaaccgggctgtatttaaagcagccaacgcgatccagacgcgcttctttcaggaagtcgagtagcatctggaaatcttcttctgtctcgccagggaagccgacaataaaggtactgcgtagggtcagttccgggcagatttcgcgccactgtttgatgcgcgccagttggcgatctacagaacccggacgcttcatcagtttgagaatgcgcgggctggcgtgctgcaacggaatgtccagatacggcaggattttgccttctgccatcagtgggatgacgtcgtccacatgcggataagggtaaacgtagtgcagacgtgtccagatccccagtttgcttaactgttcgcacaggctgaccatgctggtttttaccggctcgccgttgtggaagccagtacgatgtttaacatcaacgccataggcggaagtatcctggctgatcaccagaatctctttaacgcccgcatctaccagacgtttcgcttcacttaacacttcgccaatcggacggctcaccaggtcgccgcgcatagacggaataatgcagaaggtgcagcggtgattacagccttcagaaattttcagataggcataatgacgcggcgtcagtttcacaccttgttctggcaccaggctcaggaatgggttgtgtttcggttttggcacgtagtgatgaacgtgctccagaacctgctcatagctatgaggcccggtgatttccagcactttcgggtggacttcgcggatctgatcttcttttgcccccagacaaccggtcacaataaccttgccgttttcattcaacgcttcaccaatggcttccagactttcttgtaccgcgctgtcaataaagccgcaggtgttgacgatcaccatgtccgcatcgtcatagctcggtaccacgtcataaccttcagtgcggagttcggtgagaatacgctcactatcaacaaggtttttcggacagccaagggaaacaaagccgattttcggctggggagttactttgctcatagcttaaaaaatattcagttacaggaaaggtcagggcagggattctacagagttctggataaaatttgtatcgcaatctcattcgctggcggaggcgaaggaaatgtaaattttgttaattcggcgtgaagaattgatcctggacagcattttgctcaaaaaatagccatactatttaattgcaacaaggctgggaagaggaggatcgaagtatgttcgttgacagacagcgaatcgatctgctgaaccggttgatcgacgcacgcgttgacctcgccgcatacgtgcaactgaggaaggcaaaaggatacatgtccgtcagcgaaagcaatcatctacgagataacttttttaaactgaatcgcgaactgcacgataaaagcctgcggttgaatcttcatctggatcaggaagagtggagtgctcttcatcatgctgaagaagcattagcgacagccgcagtatgtttgatgagtgggcaccatgattgcccgactgttattaccgtcaacgccgataagcttgaaaattgtctgatgagcttaacgctgagtatccagagcctgcagaagcacgccatgcttgagaaggcctgaaaactaagggggagaaagcgtctcccccttcatgtttaagtttttgtaaaaatgaatttgttatctcctccactgactacgctttaagccagagtcaatccggaggcgttatgcatcgacaatcctttttccttgtgccccttatttgtctttcttccgctctctgggcggctcctgcaacggtaaatgtcgaagtactgcaagacaaactcgaccatccctgggcactggcctttttacccgataatcacggtatgttaatcactctgcgcggcggcgagttgcgtcactggcaagcaggaaaaggattatctgcgccgctttccggagttccggacgtttgggcgcacgggcagggcggcctgctggacgtggttttagcgcctgattttgctcagtctcgccgcatctggttaagttattccgaagttggcgatgatggcaaagccggaactgctgtgggttatggccgcttaagtgatgatctcagtaaagtgaccgacttccgcaccgtctttcgccagatgccaaaactgtctaccggcaaccattttggcgggcggctggtattcgacggtaaaggttatctttttattgctctgggcgaaaacaatcagcgcccgacggcgcaggatctggataaattacagggcaaactggtgcgtctgaccgaccagggcgaaatcccggatgataatccttttataaaggaatccggtgcgcgcgccgagatctggtcttatggcattcgtaatccgcaaggaatggcgatgaatccgtggagtaatgcactgtggctgaatgaacatggcccgcgcggtggtgatgaaattaatatcccgcaaaaaggcaaaaactacggctggccgctggcaacctggggaatcaactatagtggctttaagataccggaagcgaaaggggagatcgtcgccgggaccgagcaacctgttttttactggaaagatagccccgctgtgagcggcatggccttctataacagcgataaattcccccagtggcagcaaaaattatttattggcgcgctgaaagataaagatgtcattgtgatgagcgtcaacggcgacaaagtgacagaagatggccgtattttaacggacagagggcagcgaattcgtgatgttcgcactggacccgacggttatttatacgttctcaccgacgagtccagtggggaattacttaaagttagcccacgcaattaactaacgggaatcatcaccactttgcgcactgcggggcgttcagtgagttgctgataccagcgttgcagatttggacgcggtgtccaggtcaggccaacgttaaacaaattgtagatgaacggtgcgatagcgatatcgcccacaccaaactcgtcgccagagaaccattttacttttgccagttccgcatcgagcagggcaaacagggcgtcgcactctttgcaactggcatcaatggcggcctgatcgcgctcttccggtggtgttctgactaatcccatcaggatcccgcgatgagcattactgagcgtctggtttgcccagtccatccatttttccgcttccgcacgacgtgccggactgtcgatccacaggcgtttttgcccgtactgtgccgccagatagcggacaatggcgttactttcccaaagaatgagatcactttcgtcgtcacgcaacaacggcaccagcccgttagggttcatcgccagaaaatcagcatcgtgatttatcccaaactcacggcccgcgagaatttgctcataaggtagttccagttcttcgagcgtcagcaatactttttttacgttagtactattattccgaccccacagcgtaatcatactcaccccttttccgacaggcagccacaggctgaacaggactccgatggtgaagtaaagttaacttttaagcaacagctggcaaaaaaatgacaccagaagcagcgaagcggcaggatattgcataaactttaaaaactttaccaacttacggtttctttaagtttgtgtgtgcgttattaatcaccaaacttatcatacggcgatataacgtattttttttgaatggatactcgggtggcatttatgacgcaatactcctctctccttcgtggtcttgcagcgggttctgcatttttattcctttttgccccaacggcattcgcggcggaacaaaccgttgaagcgccgagcgtggatgcgcgtgcatggattttaatggattacgccagcggtaaagtgctggcagaaggcaatgcggatgagaaactggatcccgcgagcctgactaaaatcatgaccagctatgtggttgggcaggcgcttaaggccgataagattaaactcaccgatatggtgacggtcggtaaagatgcctgggcgacgggaaatccggcactgcgtggtagtagcgtaatgttcctcaaaccgggcgatcaggttagcgtggcagacttgaacaaaggtgtgattatccagtccggtaatgacgcctgtattgcgctggctgattacgttgccgggagccaggagagttttattggtctgatgaatggttatgccaaaaaactgggtctgaccaacactaccttccagacggtgcacggcctggatgcgccggggcagttcagcaccgcgcgcgatatggcattgctgggtaaagcattgatccacgatgtgccggaagagtacgccattcataaagagaaagagttcaccttcaacaaaattcgtcagcctaaccgtaaccgtctgctgtggagcagcaatctgaatgttgatggcatgaagacaggaaccacggcaggcgcgggatataatctggttgctagcgctacccagggcgatatgcgtttaatctccgtagtgttgggggcgaaaaccgaccgtatccgttttaatgagtctgagaaattattgacctggggtttccgcttctttgaaaccgtgacgccaattaaacctgatgccacctttgtgactcagcgcgtctggtttggtgataagagcgaagtgaatctcggggcaggtgaagcgggcagtgtgaccataccgcgtgggcagctgaaaaacctgaaagcgagttatacgttaacggaaccgcagcttaccgcaccgctgaaaaaaggtcaggttgtcgggaccattgatttccagcttaacggtaaatccattgagcagcgtccgctgatcgtgatggaaaatgtggaagagggcggattctttggtcgggtgtgggatttcgtgatgatgaaattccatcagtggttcggcagctggttctcttaatcttctgataaccggatggcgcgaaacgtcatccggttatacgtcattaatacatcaacttaatgcgctgcgtctgcgcgtacttcacatactcatcttccgggcaacaatcgctcaccacaatatcaaagcgtttcaggtcacccatgcgcgccggacgcaccttgccaaatttactgtggtcgacaaccagcacatgcttttgcgccatgctcatggcccagtgttttaccggcaactcttcaagattaaaacaggtagcgcctttactgacatgcacgcccgccgcagaataaaaagcgatatccgggcaaaaattattcagcgtttgctgaaaatcgatgggtttgaaaatggcgttgctggcgtgaaattcaccaccgcaaagaaacgcgcggcaatggggtttctctttcagcgccagaaaggtatttaggctataacaaacggcggtaaaagggatttcattatcaatcgcttcaataatccacggcgtggtggtgccacagtcaaaaaagagggtctgatcgggttctaccagcgtcgcagccagttttgccgcccggcgtttttcttccaccaggcgggatttttgatcgcttaacaggtaatggctggcactgcgcggttccagaacaatatagccgccgagcaaaacgacgggcgcactgtggttgttcagatcgcgacgaatcgtcatctcgctaaccccaagcagggcggcggcgtctttaagatgtaacttatcgctgcgttttaattcttgcagcagctgcccgatacgctcttcgcgacgtgtttccataatccctctgaatagttattgaagcgagccgctcaatactacactttttagcagagatcagtcacgcacccagcctttgcggatcggtaatgcaaaacagacgcgataccagctttgcagacgttgatagagtttatgccccatcgcttgccagataatctgggcactaaggcagccaatcatacctgccagcaatccaccgagcatatccagcggccagtggacgccaagataaacgcggctccaggcaatgacgacggccagcaccattaaaagactgccggaccacaggcgatgccagcataaaaatgccagtgcaaaggtgaaaatcaccgtaccgtgatcgcttgggaaactgtcatccgccgcatgatgcaggaagttatagccgatattttcgacaaagggtcggtcgtgcggaaaaagatgtcccatcgtccaggacacaaacaggctgaccgccagcgcgatagcgatttttatcaccagttgccgttgtgctgtaagcccccacaaccaaagtaccacggccagcaacggcaccacggtaatcaaatctttagcaataaaaatcgccaagctgatcatccacggagcgctgtctggcgtcgcgttaataagagagaatagagagagattcaaattttccagcataacttcccgacgcaaagtgattaaaagggagccaatacaggcaagtcgttgagaataaagtgcaggttaaactgggtaaagcggcatcgtcttatttccctcaagcggcctgtttacggtgggtgattgtaacgggcataggttaaataaaacttaaagaaagcgtagctatactcgtaataatgtaagaatgtgcttaaccgtggtttcagctacaaaattcgctttctcgttagctgcgcttttattaaactctgcgcgattattattggcgaagaaattgcatgcaaaataaattagcttccggtgccaggcttggacgtcaggcgttacttttccctctctgtctggtgctttacgaatttagtacctatatcggcaacgatatgattcaacccggtatgttggccgtggtggaacaatatcaggcgggcattgattgggttcctactagcatgaccgcgtatctggcgggcgggatgtttttacaatggctgctggggccgctgagcgatcgtattggtcgccgtccggtgatgctggcgggagtggtgtggtttatcgtcacctgtctggcaatattgctggcgcaaaacattgaacaattcaccctgttgcgcttcttgcagggcataagcctctgtttcattggcgctgtgggatacgccgcaattcaggaatccttcgaagaggcggtttgtatcaagatcaccgcgctgatggcgaacgtggcgctgattgctccgctacttggtccgctggtgggcgcggcgtggatccatgtgctgccctgggaggggatgtttgttttgtttgccgcattggcagcgatctcctttttcggtctgcaacgagccatgcctgaaaccgccacgcgtataggcgagaaactgagtctgaaagaactcggtcgtgactataagctggtgctgaagaacggccgctttgtggcgggggcgctggcgctgggattcgttagtctgccgttgctggcgtggatcgcccagagcccgattatcatcattaccggcgagcagttgagcagctatgaatatggcttgctgcaagtgcctattttcggggcgttaattgcgggtaacttgctgttagcgcgtctgaccagccgccgcaccgtacgtagcctgattattatgggcggctggccgattatgattggtctattggtcgctgctgcggcaacggttatcagtagccacgcgtatttatggatgactgccgggttaagtatttatgctttcggtattggtctggcgaatgcgggactggtgcgattaaccctgtttgccagcgatatgagtaaaggtacggtttctgccgcgatgggaatgctgcaaatgctgatctttaccgttggtattgaaatcagcaaacatgcctggctgaacgggggcaacggactgtttaatctcttcaaccttgtcaacggaattttgtggctgagcctgatggttatctttttaaaagataaacagatgggaaattctcacgaagggtaaaaaaatgcctgactgctttgtgcgatcaggcattctcgaattaatggtgatggtcgtcaatctggtgttcgataaccatcccttcacctacgctggcaagatggcgaacataaggatgcgggcggtaagccggagctggcgcaggagccacatagacggtttgcggcacagtcgcgacgctgaccgcttgtggaacgctgacactatcaggaaccacaaccactttgtatccactcggcacatcgacggtgacactttgcgccatcgccacaccagtaaagcccattaaaagcgcgcccaacagtagacaatttttcataatcatttcgcctgaaataatgcagcgggttaatttccgcgaattatgcagccttcattcaggcattgtgttgccgggcgtgctgccggttttattggtcaaatggcgcttcgtgtttaagaactttatcgatcacatccagtacgccttcacggttattggagcctgcgcggtattttgccgctgcgacgaccgcgctaccggcattttccattgcaaaactaaagcctgcctgacgcagcatctcaatatcgttaccgccatcgccaaagaccaccacttcgctgtcgtctattccccataatttctgcagttggcgaaggccattggctttatgtacgccggggataatcagatcgatgctgccgttgccggtgtggacgctcaccataatatcgccgatggcctcatgtaatgctttttgtacttgtggaatcagttcatcggaaagattcaggccaaacttaaagaagatatcctctaagttgtcaaagttatcgacgtattccagacggtgataatacatttccgccaccgttttcatggcatcgtcatattttttgagtgtataggcactattttttccgcaggcaataatttccacttccgggcgcgtcagcaaatgttccacgacagtagcaaacgcatccttgcttagctcgccattaaaaacatctttgccttcgctcactacccagccgccgttttcagccacaaaggcaatttcattagcaatttcagggaagaaagagatcaactgataatattgattcccgctggcgactacaaagcgaattccttgtgctttcatttgctgatactgagccataaaccgctcacggttataggttttttgatcgcttaagaaagtaccatccatgtctaccgcaattaatttaatgctcatcaactattctccatcgccgtctgcgttttggtatcgggtttggcgacggctttcgcgacaatagccgcgagaataaccagcgccagtacaaccagcattgcactacgtaatccataatgttcgccgagatagcccagcagcggcggcccgacgaggaaagccagataaccggtcgttgctaccacactgacgcgggttggtgcatcggggccggtatcgctggcggcagaaatggtcagcgggaagcccaggctggcacccagtccccagagtacaacagacaccccagcgacccaggcgctatcgacaaaaataatcagcccaatacccaacgcccccattagtgcactggcccgaaccacggcaacgcgactgtaacggtcgatgaaccaaccgccggtgaagcgtccaacggtcatccccagggtaaaaccggcataaatcaggctgccggaagtagggctaaaaccgtgaccgtcaaccattaataagggtaaccagtcgttggcagaaccttcggcaaaggccatcgccagcaccacaacacctatcagcagcaactggatatcgcgataaaaaggtacgcctttttcgccatgctgggtgccatcggcagcatttttgcccgtaccgtcagggattgcctgaatggcgatataaataggtgcgatacctaccagcgccgccaataaaatgtgcaccgttgccggaacgccaaaggccgtcagtgccatcccgacacctgcgcctgccagcgtgcccaggctataaaaaccgtgcatcatcggcaaaaccgtcttattcatttctcgctcaacggcagcaccttcaacgtttatcgccacttccgcagaaccaaaacttgccccaaagacgccgagaccaacggcaaagagcagggggcttgtcagccagagtgccagacttaatatcatcatcccgatcaatgcgcaggacatcgtgaccaggatgacattacgtgtcccaaagcgtttcactaaccacgcgctgcagagaataccgctcatgctaccgatgctcagaccaaagagaacaccgcccatttcagcgatgctgacagagagaatatcgcggatagcaggcgtacgggttgcccaggacgccattaacaggcctggcaaaaagaagaacataaacagcgcccaggttcggcgtttcaatgcattacgactagaatttacggtcatagatcacgtcaaaataagaagagggaagacaacattagcaaggttgtgtacatttgtacacaattgcagagagaggaaatgacatgcgtcgcgctaacgatccgcaacggcgagaaaaaattatccaggccacgctggaggcggtgaaactttacggaatacatgctgttacgcaccgcaaaattgctacccttgccggggtaccgttgggaagcatgacctactattttagtggaattgatgagttgttactggaggcgttcagcagttttactgagatcatgtcccggcaatatcaggcattttttagcgatgttagtgatgctccgggcgcatgccaggctatcaccgatatgatctacagcagtcaggttgcaacgccggataacatggagctgatgtaccagctctacgcgctggctagccgaaaaccgctattaaaaacggtaatgcaaaactggatgcagcgcagtcagcaaacgctcgaacaatggtttgaacccggaaccgcccgcgcgcttgatgcgtttattgaggggatgacgctgcattttgtcaccgaccgtaagccgctaagccgcgaggagattttgaggatggttgagagggttgcagggtaatagataagttttagataacaaaaaacccatcaaccttgaaccgaaatggcggggttgatgggctccacaaaatggggacatcaaagaaaagcagtggcactaattaagactgatgccctgcggaaaagttctgcggttgtgcaaaaaaatttcattttcagggcaacttcagttttatcctaatcctggccataccatgacgatgattgtccctgccagcgtcagcaggacgttggcgattgcataggtgcccgcatagcccagcgccgggatgttactgcgagctgtatcactgatgatctccattgccggcgcgcaggtacgtgcgcccatcattgcgccgaacaacagcgcgcggttcattcgcaatacataagcaccgaacaagaaacagataaccacgggcaccagactgacaatcaatccggcaatcaacatctgaccgccaatcgcgcccaggccgttattaataccgctaccggcgctcagaccaacgcctgccataaacaccatcaagccgaactctttcaccatgcttaatgcaccctgcggaatgtaaccgaaggtcgggtggttagcacgcataaagcccagcataattccggcgaataacaacccggcagcgttccccatgccgaaactgaatgtgctgaactggaaggtgatcatcccgatcatcagcccaataacaaagaaggcgcagaatgccagcaggtcagtgacctggctgtgaatgctgataaagccgatgcgatcggcgatggtttttacgcggcgggcatcgccgctgacttgtaaaacgtcacctttgttaagcacgacgttgtcatctatcggcatctcaatctggctacgaatgacgcggttaaggaagcaaccgtgatcggtcaacttcagttgtgcgagacgtttacctacagcgttatggtttttaacgaccacttcttcagtgacgatacgcatgtcgagaaggtcacgatcgaaaacttctttaccgttacggaagctgggatcgagtcgggcatgggcgtcgggatagcctaccaacgctatttcatcgcccatttgtagcacggcatcaccgtctggatttgccagaatcccgttacgtcgaatacgttcaatgtagcagccggtttgtcgataaatacccagttcacgcagatttttgccgtcggtccaggccaccagttccgggccgacgcgataggcgcggatcaccggtaaataaaccttacggttggcatcagtgtccaggccacgttcgcgggcgatttgctgggcgctggtctgtaagtcctgatgctgcaatttcggcaagtaacgcgcaccaacaatcaaactcaccagaccgattaaataggttaaggcatacccgaggctcagattatccagtgccagactgagctgcctgctttccatgccggaatgacgcagtgtatcgccagcaccgaccagaaccggtgtgctcgtcatagagcctgctaacataccggccgtcaggccaatatcccagccaaacagcttacctaaccctaaggcgatcaccagcgcactgccaaccatcaccagtgctaacattaggtaatttttcccatcgcgaaaaaaaatggaaaaaaagttcggtccggcttcgaccccgacgcagaaaataaacagcataaagccaagattaagcgcatcggtgttaatgctgaaatgttgttggcctaataacaggcttacgactaaaacgccaatggaattacccagttggatgctaccaagtcgtaactttccgagacatagcccaagcgcgaggaccacaaataataacagaatgtaattcccatttaacaattcggcgacgtttatattcacggaggctaacttcttgtttactagtaagctgttgaaagaaatggtaatttacgataatgttttttaccagaattcagggcgcagattcattcagcgcacctaaacgatagtaaagtaacaatatattttactagtgtaatcacattaggtatcaacggctatatgaattgcgttggcctatattagcatggaatgcgaagcggctttatcttactgaacgccacactggcgaaaaatgtgttcgatagacgcagtgtcaggaggaacgagtgaaacataaacaacgttgggcgggggcaatctgctgttttgtcctcttcattgtggtgtgcctttttctggcgacgcacatgaaaggcgcttttcgggctgccgggcatcctgaaatcggcttgctatttttcattcttcctggagcagtcgccagcttctttagtcagcgtagagaagtcctgaaacctctgtttggcgcaatgctggcggcaccctgtagcatgctcattatgcggctgttttttagtccgacgcgcagtttctggcaagagctggcatggttactaagcgcggtgttctggtgtgcgctgggggcactgtgtttcttatttatcagtagtttgtttaaaccacagcacagaaaaaatcagtaaagccctcaacgcgagggcttgtcagacgatcaggcgtccagattttctttcacccatgcagcaaaatcggtatagccgccgatatgttgctgatcgacaaaaatctgcggcacggtttctacgggtttacctgccttttgttgtagatcttctttagtgatcccttccgcacgaatatctacatactgatactgaaaatcatcgcgttcattgctcaatttctcagccagatcttttgcacgcacacagtaagggcaaccgctacgaccaaaaataacggtttgcattatttctctcctcatagatttatgcctgtaatgatcacgctaaaatgtattcgctgaaagtaggtttaacctgttgcattaattgctaaaagctataactgttaaacacaatacagtgaaaagttttagactgaaggctcactttgcagagggaagcgtatgcgcgcgatcggtaaattgcctaaaggcgtgttgatactggaatttatcggaatgatgctactggcggtggcgctgctgagcgtaagcgactccctgagcctgcctgagccattttctcggccagaagtgcagattctgatgatttttctcggtgttttgctcatgcttcccgctgcggtggtggttattcttcaggtggcaaaacgtcttgccccacagctgatgaaccgtccaccgcaatatagtcgtagtgaaagagaaaaagataatgacgccaaccattgaacttatttgtggccatcgctccattcgccatttcactgatgaacccatttccgaagcgcagcgtgaggcgattattaacagcgcccgtgcgacgtccagttccagttttttgcagtgcagtagcattattcgcattaccgacaaagcgttacgtgaagaactggtgacgctgaccggcgggcaaaaacacgtagcgcaagcggcggagttctgggtgttctgtgccgactttaaccgccatttacagatctgtccggatgctcagctcggcctggcggaacaactgttgctcggtgtcgttgatacggcaatgatggcgcagaatgcattaatcgcagcggaaagcctgggattgggcggggtatatatcggcggcctgcgcaataatattgaagcggtgacgaaactgcttaaattaccgcagcatgttctgccgctgtttgggctgtgccttggctggcctgcggataatccggatcttaagccgcgtttaccggcctccattttggtgcatgaaaacagctatcaaccgctggataaaggcgcactggcgcagtatgacgagcaactggcggaatattacctcacccgtggcagcaataatcgccgggatacctggagcgatcatatccgccgaacaatcattaaagaaagccgcccatttattctggattatttgcacaaacagggttgggcgacgcgctaaaaccgccacgtcgatgtatgatacgcgggcttttgaccaggtctgacagagaggtgcagggtgaaaattgccatattgtcccgggatggaacgctctatagctgtaagcggctgcgtgaagccgctatacagcgcggtcacctggttgaaattcttgatccgctttcttgctacatgaacataaatcctgcggcgtcttctattcactacaaaggccgcaagttaccccattttgacgcagtgatcccgcgtattggcaccgccattaccttttatgggacggcggcactgcgccagttcgagatgctggggagctatccgctcaatgagagcgtcgccattgcccgggcgcgtgacaaattgcgttccatgcaactgctggcgcgtcagggcatcgacctgcctgtcacgggcattgcgcatagcccggatgataccagcgatttaatcgacatggtcggtggtgcgccgctggtggtcaagttggttgaaggcacgcagggaattggcgtcgtgctggcggagacgcgtcaggcggcggaaagcgtgattgacgctttccgcggtctgaacgcgcatattctggtgcaggaatatatcaaagaggcgcaagggtgcgatatccgctgtctggttgttggcgatgaagtggtcgctgcgattgaacggcgggcgaaagagggcgattttcgttccaatttgcatcgtggcggcgcggcaagcgtcgccagtatcacaccacaggagcgtgaaatcgcgataaaagccgcgcgaacgatggcgctggacgttgctggtgtggatattctgcgtgctaatcgcgggccgttggtgatggaggtgaatgcgagcccggggctggaaggaatagaaaaaaccaccggtatcgacatcgcgggtaaaatgatccgctggatcgaacgccacgctacgacagaatattgcctgaaaacgggtggttaatcgcaatcacattactgatcatggttttgcctgcgctttttgcgtaagctgtgccggtctttttatcgaaagaggttgtacaaaattatgacaagcctggtcgttcctggtctggatacgctgcgtcaatggctcgatgacctggggatgagtttttttgaatgtgataactgtcaggctctgcatctgccccatatgcagaatttcgacggtgtctttgatgccaaaatcgatctgatcgataacacgatcctgttttctgccatggcggaagtccgacctagtgccgtattgccgctggcggcggatttatctgccatcaatgccagtagcctgaccgtgaaagcatttcttgatatgcaggatgataatctgccaaagctggtggtttgccagtctttatccgttatgcagggcgtaacctatgagcagtttgcatggttcgtgcgtcagagcgaagagcagattagcatggtcattcttgaagctaatgcccatcaactgctgttaccgactgatgatgaagggcaaaacaacgttaccgaaaactatttcctccactgataactcctttcgagcacgcagtcgctggtgcagtggctgcgcgctgcaaaattatctgctgtttttaaccttttcttaaagattatttcacttctcttgtgtcgatttggctttatcacatagagcaaatatgcataaaaatttgttaaataccgttttttaatccgagctatagtctcaaaccctggctaaagttattcttgcgatgcttttatatagcgagcagtgctggccgggagaaagttctcttttcttacaccgcgccgataaaaaatatgcacgtttattgcatatctttcagtgtgacaacttttgttcgtttgttaacgaactttcagaaggaaagagatatgaccgccttaaataaaaaatggctaagcggtctggttgcgggtgctctgatggccgtctctgtcggcacgctcgcggctgaacaaaaaacactccacatttataactggtctgattatatcgccccggacacggtggccaattttgaaaaagaaaccggtattaaagtcgtctacgatgttttcgactctaacgaagtactggaaggcaaattaatggccgggagtaccggctttgatctggtggttccatctgccagctttctggagcgccagttgactgcgggagttttccagccgctggacaaaagcaaattgccggagtggaagaatctcgacccggaactgctgaagctggtcgccaaacacgatcccgacaataaatttgctatgccctatatgtgggcgacgaccgggattggctataacgttgataaagttaaagcggtgctgggcgaaaacgcgcccgtcgatagctgggacttgatcctcaaacctgaaaatctggaaaaactgaaaagctgcggtgtctctttcctggatgcgccagaagaagtttttgctaccgtgttgaattatctcggcaaagatcccaacagcactaaagcggatgattacaccggaccggcaacagatctgctgttaaagctgcgcccgaacattcgttatttccatagttctcaatacattaacgacctggcaaacggcgatatttgcgtcgctatcggctgggcaggtgatgtctggcaggcgagtaaccgcgcgaaggaagcgaagaatggcgtgaatgtcagcttcagcattccaaaagaaggggcgatggcgttctttgatgtattcgccatgcctgcggatgccaaaaacaaagacgaagcctatcagttcctgaattacctgctgcgcccggatgtagtagcgcatatttccgaccatgtgttctatgccaacgccaataaagcagccacgccgctggtgagtgcggaagtccgtgagaacccaggtatttatccgcctgcggatgttcgtgcgaagctgttcactctgaaagtgcaggatccgaaaatcgaccgtgtgcgcacccgcgcgtggaccaaagtgaagagcggaaaataatccgcagtcgtagatgccggaggggcgcaccacacccgccggcaattcgcaccattatggtgcgcttgcacacattcaatgccggagagcagccgtgaatgacgctatccctcgcccgcaggcgaaaacccgtaaggcgctgacgccgctattagaaatccgcaacctgaccaaatcctacgatggtcaacatgcggtggatgatgtcagcctgaccatctacaaaggtgaaatcttcgcgctgctgggcgcatccggctgtggcaagtccacgctgctgcgtatgctggcaggtttcgaacaaccttctgccggacagataatgcttgatggcgtcgatttgagtcaggttccgccttacctgcgccccatcaatatgatgtttcagtcttacgcgctgtttccgcatatgaccgtggaacagaacatcgcttttggcctgaaacaggacaaactaccgaaagcggaaattgccagccgggtcaatgagatgctcggcctggtgcatatgcaggagttcgccaaacgcaaaccgcatcagctttccggtggtcagcgacaacgtgtggccctggcccgaagccttgcgaagcgcccgaaactattactgctcgatgagccgatgggcgcgctggataaaaagctgcgtgacaggatgcagcttgaagtggtggatattctggagcgcgtcggtgtgacttgtgtgatggtcacccacgatcaggaagaggcgatgaccatggcggggcgcatcgccattatgaatcgtgggaaatttgtccagattggcgaaccggaagagatctacgagcatccgactacccgctatagcgccgaatttattggcagcgtaaacgtctttgaaggcgtactcaaagagcgtcaggaagatggcctggtgcttgatagcccggggctggtgcatccactgaaagtcgacgcggatgccagcgtggtcgataacgtgccggtacatgtggcgctgcgcccggaaaaaatcatgctttgcgaagagccgcccgccaatggttgtaacttcgcggtgggggaggtgatacacattgcctatctcggcgatcttagcgtgtatcacgttcgtctgaaaagtgggcagatgattagcgcccagctacaaaacgcccatcgtcatcgtaaagggttaccgacctggggcgacgaagtgcgtttgtgctgggaagtggacagctgtgtggtgctgacggtttaaggagcaaagatgagtacacttgaacctgctgcccagagcaaaccgccgggcggatttaagctgtggttgagccagctgcaaatgaagcatgggcgcaaactggtcattgcgttgccatatatctggttgatcttgctgtttctgctgccatttctgattgtctttaaaataagcctggcggagatggcgcgcgctattccaccttataccgaactgatggagtgggctgacgggcaactgtccatcactcttaatctcggtaattttctgcaactgaccgacgatccgctctatttcgatgcttatctccagagcctacaggtggctgcgattagcacattttgctgtttactgatcggctatccgctggcgtgggcggtggcgcacagtaagcctagcacccgtaatattttattactactggtgatcctgccgagctggaccagctttctgatccgcgtttatgcctggatgggaatattaaaaaacaacggtgtgctgaataattttctgctgtggctgggggttatcgatcaaccgctgaccattctgcataccaatctggccgtttatatcggcattgtttacgcttacgtgccgtttatggtactgccgatttataccgcgttgattcgtattgattatagcctggtggaagcagcgctggatctcggtgcacgaccgctgaaaacgttctttactgtgatcgtgccgctgactaaaggtgggattattgccggaagcatgctggtgtttatcccggctgtgggcgagtttgtgatcccggaactgctcggtggcccggacagcatcatgatcgggcgcgtgctatggcaagagtttttcaataaccgcgactggccggtggccagcgcggtagcgatcatcatgttgctgctgctaattgtgccgataatgtggttccacaaacaccagcaaaaaagcgtgggagaacacggatgaataatttaccggtagttcgtagcccctggcggattgtgattttgctgctgggctttacctttctctacgcgccaatgctgatgctggttatctatagctttaacagcagcaagctggtgacggtgtgggccggctggagtacgcgctggtatggtgagttattgcgcgatgacgcgatgatgagtgcggttggtttaagtctgacaattgcggcctgtgcggcgacggcggcggcgatcctcggaactattgcggcggtggtgctggtgcgctttggcaggtttcgcggaagtaatggctttgcctttatgatcaccgcgccgctggtaatgccagatgtcatcacgggcttgagcctgttgttattattcgtcgcgcttgctcatgccattggctggcctgcggaccgcggtatgctcaccatctggctggcgcatgtcactttttgtacggcttatgtggcggtcgttatttctagtagattgcgggaactggatcgcagcatagaagaagcagcgatggatctcggtgcgacgccgctgaaagtgtttttcgtcattacgctaccgatgatcatgcccgcgatcatttctggctggttactggcttttactttgagccttgatgatctggtgatcgccagctttgtttccgggccgggagccaccacgttaccgatgctggtcttttccagcgtgcggatgggggtgaatccggaaatcaacgccctggcaacattgatcctcggcgcggtcggaattgtcggatttatcgcctggtatctgatggctcgcgcagaaaaacagcggatacgcgacatccagcgtgcaagacgtggctgaagacactaaaatttgccaacctggctacataatgccgcgcatgtcgcggcattgttttcatggaagacgaaacgttgggattttttaagaaaacatctagttctcatgctcgcctgaatgtgcctgcgctggtgcaggtggcggcgctcgccattattatgatccgtggcctcgacgtgctgatgattttcaatacgctgggcgtgcgcggtattggcgagttcattcatcgcagcgtacaaacctggagtttaacgctggtctttttaagcagtctggtgctggttttcattgagatctggtgtgcgtttagtctggtgaaagggcgtcgctgggcgcgctggctatatctgctgacacaaatcaccgccgcaagttacttgtgggcggctagcctggggtacggttatccggagctgttcagcattcccggtgaaagtaaacgtgaaatcttccatagcctgatgctgcagaagctgccggatatgctcatcctgatgctgctgttcgttcccagcaccagtcggcggttcttccagttgcaataatgtgtataatcgtcgcccctgatgatgtgaaggtcaatgtatgcagtgcgcactttacgacgcgggtcgctgtcgttcctgtcagtggataatgcagccgattccagagcaactctccgctaaaaccgccgatcttaaaaatctgctcgccgactttccggttgaggaatggtgcgcgccggtgagtggcccggaacaagggtttcgtaataaagccaaaatggtggtgagtggtagcgttgaaaaaccactgctcggtatgctgcatcgcgatggcacaccagaagacctttgtgactgcccgctttatcctgccagttttgcgcccgtttttgcggcgctaaaaccgtttatcgcccgagcggggttaacgccctacaacgtggcgcgtaagcgtggcgaactgaaatacattctgctgactgaaagccagagtgatggaggcatgatgctgcgctttgtactgcgttctgataccaagctggcgcaactgcgtaaggcgctgccgtggttacacgaacaactaccgcagctgaaagttattaccgtcaatattcagccggtacatatggcgattatggaaggggagacggagatctacctgaccgaacaacaggcactggcggagcgttttaatgacgtaccgctgtggatccgtccgcaaagtttcttccagactaatccggcggtcgccagccagttgtacgccaccgcgcgcgactgggtacgacagctgccggttaaacatatgtgggatctgttctgcggtgtggggggctttggtttacactgcgcgacgcctgacatgcagttaaccgggatcgaaattgcaagtgaggccattgcctgtgcaaagcagagtgccgctgaactgggcttaacgcgtttgcaatttcaggcgctggactccactcagtttgccaccgctcagggggatgtgccggagctggtgctggttaacccgccgcgccgcggcattggtaaaccgctgtgtgattatctcagtacgatggcaccgcgttttatcatctactccagctgtaacgcccaaactatggcgaaagatatccgcgaactgcctgggtttcgtattgaacgggtgcagcttttcgatatgttcccgcataccgcgcactatgaagtgctgacgctgctggtgaagcaataaaaaagccgcatgtgcggcttcagattgctgacaaagtgcgcgttgtttatgccggatgcggcgtaaacgccttatccggcctacaaaagcgtgcaaattcaatacattgcatgggccatgtaggcctgataagcgtagcgcatcaggcaattttacctttgtcatcagtctcaagccgcggttgcggctttctgaatcttactgtgggaaccactggtcactgattttttgataagtaccgtcagctttaattgctgccagcgcgttattcagtttttccagcagggctttgttatccggacgtacagcgatgcccaggccggtgccaaaatattgcggatcggtcactttctcagtagcaacaccaagttgtggattggttttcagccattcgtttaccaccgctgtgtcaccaaataccccatcaatacgaccatttttcagatcgataaaggcattctgataactgtcataagagacagttttcacttccgggtgctgatcctgaatatatttctggtgcgtagtaccgttttccatcccaatacgtttgcctttcagatcggcaaacgttttgtaggtatcttttttggcaatcacgacggcactgttttcatagtagggcgtggtaaagcttacctgtttgctacgctccggggtgatatccataccggagattacggcgtcatattttctgaatttcagggacgggatcaggctgtcgaacgcgtgattagtaaaagtacattctgcctgcatttgtttgcacaaggcttttgccagatcgatatcaaagccgacaatctcattattagcacctatagattcaaagggtggataggtggcactaacgccaaaattgattttctctgcggcagaagcaccgaaagtaaaggaagcaagtaaagcggcaagaactaactttttcatgatggaactcccgtctgtcaatcttatgatttttggccgtgtctgcggcatgggataacaatgccatcaagtgaatttatatgcaataaacatgattaaataatttaaatgaaataaaaaagacggacaacttagtgggttgtccgtcttcattataagaatttatgcactatgtaggccggataaggcgtccccgccgcatccggcacaggcaccgtgctgatgtctgatgcgacgctggcgcgtcttatcagacctacaaaaccccccggcgaatgtacgcagccacattaatttcgccgttcgaatgccagcgctttgcgctcgatcagacgcatcatcagcgtcagcaggccgttaacgaccaggtaaataatccctgccgcaccgaacaccattacatcgtaggtgcgtccgtacaacaactggctgtatcccatcacttccatcagcgtaatggtgtatgccagagaggtacttttgaataccagcaccacttcgttggaataagaagagaggctgcgtttaaaggcatacggcagcaggatcgccagcgtatcttttttgctcattcccagggcgctacaggactgccactgaccttccgggatcgcacgaattgcaccgtaaaacagctgcgtggtatacgccgcactattcaggctcaacgcaatcagcgcacataaccacggttcactcaacaaatgccacagtgccggatactcctgcaaagtcggaaactggcccggcccgtaataaatcaggaagatctgcaccagcagcggcgtaccggtaaacagcgtgatataaccccgcaccagccacaccagcaccggcgttttcagcgtcaggatgatggtaaaaatcaatgccagaatcagtgccacaatcaggctggcaacggttagcgtcaggctggtgtgtagccctttcatcagttcgggtaaatactcaaacattagctgggcctccgctcaaaacgtgtcgcgcgcaggtcaatgcgtttgagaatgtactgactgagcagggtgatcaccaggtaaatcgccgccgccacaatgtaccaggtaaatggttcctgggtacgagtagcgatgctttttgtttgcagcattaaatcattcacactaatcaaactgaccagcgcggtatctttcagcagcaccagccactggttaccgaggccaggcagcgcatgacgccacatctgcggcatcaccagacggaaaaagatagcgcttttgctcagccccagcgcctgaccagactcccactgacccaccggcaccgctttcaacgcgccccgaagcgtttggctggcataggcggcatacagcagactcagagcgatgacaccacaaaggaacgggctaacgtcgaagttctcaatgtccatctgcactgggatctgcacgaacccaagattgatagtgaagccatcgctaagcgtcagcagcagctggctggagccaaaatagataaacagcaccaccagaatttctggcaggccacgcagaatggttaccagcgcactacctgcccacgcgacaggacgccattttgcgctctcccataccgcaaagaacatcgccagcgccagcccgacaatcaatgcacaaacggcaaggccgacggtcatcccggcggcgcttgctaaaggaaaaaattcattcatcaggaattacttctggaaccatttgttgtagatggtttcgtaagtgccatctttcttcactttttccagcgcagtgttgagtttctgctgcagctcagtgttgccctgacgtaccgcgatgccgaggccagtgccgaagtaatctttatcggtcactttgtcgcccaccgccgccagtttcgggttatctttcagccactcagtgaccactgcggtgtcaccgaagacgccgtcgatacgcccgttttgcagatccagttttgcgttctggtagctgtcatacggaacggtagtgatttccgggtgcttatccataatgaatttctggtgtgtcgtcccgttctgtacgccgacttttttgcctttcagctgatcaacactggtgtatttgccttgctgacccacaaacagggcagagttgtcatagtacggggtggtaaacagcacctgcttttcacgctccggagtgatatccatgcccgccatcacggcttctacgcgacggaatttcaggcttgggatcaggctgtcaaacgcctggttagagaaagtgcaggttgcatcaatctctttacacagcgcttgtgccaggtcgacgtcaaaaccaacgatctggttgtttgcatcaatgctttcaaacggaggataggaggcttcggtagcaaaacgaatggtttcggcagctgtggcggaaagactaaaacctgcaattaacgcggcaatcagaacttttttcattgttgttatcccgaatcttagtgagagagatagtttttaaatgcttcggtttgcggctcggtaaagcagctcgcgtcgccttgttctacgatatgaccattttccatatacaccactcggctggcggttttacgcgccacttcaacttcgtgggtgacgatcacctgggtaatattcgtttctgccagctcacgaatgatgctgacgatttgtgccgtaatttccgggtccagtgcggcggtcggttcatcgaacagcagtacctgcggttccatcatcaacgcacgggcaatagcaacacgctgctgctgaccaccagaaagatgcagcgggtaacgatcgctataaggtttgagacgcagacgttccagcagtttttctgcacgggccagcgcctgatctttactcaaccccagtacacggcagggcgcttcaatcaggttttgctgcacggtcagatgcggccacaggttgtattgctgaaacaccatgccaacgttacgacgcaaatcgcgaatcgctttgtcagagggtgttttggtgaaatcgaaatggttgcctgcaatgttgagcgtaccggagcgcggcatctcaagcagattgagtacacgcagcaggctgcttttacccgcgccgctggggccaagtaacaccagcgtttcgccctgtgggcaatccagcgtgatatcgaacagcgcctgatgcgcgccgtagaagcaattaatgccgtttaattgaatactcattgacactcgtatactggcagtctgatagctattgaggtcgaagatagtacctttgacagaataattatgcaatatttctgctttaaaagttaaaagcaaagcgcattattcaataaacatagcacaaaataacgggggcggtggtcggcgagcataaatgtcggcattcctcacgaaatgccggacaatttacggggtttattggttgatcaaggcgttagcgattctcgatggactgacggagcgtacccgccgtggcatgaacgctaccgcctaagtaacgcacatcgtcgatgacccaacactggccttcctgaatcattaacacttcatcctgccaaccctggtcaccctgtttgagatccacgcgcaatggaatgttacgggcatcacgattagggatagtgcttgcactggcaacgtgggcgctatctggcaaggtggttcgactggagaatggatcgttggtcagtagttcccgatggttattatcccgggaggcatcgctaagcagtgtcgccagtttgtcgctcagataagggcgcaaggcggtgatgtcgttgctgcggtgcaaaatgcggtagtcataaaattgctgggccacgttatccgggcctccttcaacgcaaggaccactgcgtgtgccgttatctttataagctggagtgactgtggtgcaggcactgaggagcagtgcgcaggggataagcattgtcaatttgctgtagcgcataatgatttccttataagcgatcgctctgaaagcgttctacgataataatgatatcctttcaataatagcgtatcagtctgataatgcttttgagatcgaaggcttagcaaacaaggagatcgatcatgcaattttctacaaccccaactctggaaggccagaccatcgttgaatattgcggtgtggtgaccggcgaagcgattttaggtgccaatattttccgtgatttctttgccggtatccgcgatatcgttggcggacgttccggtgcgtatgaaaaagaactgcgtaaagcacgggagatcgcctttgaggaattaggctcccaggcgcgggcgctgggggccgatgccgtcgtcggtattgatatcgactacgaaacggtcgggcaaaacggcagtatgctgatggttagcgtcagcggtacggcggtgaaaacgcgtcgatgagaagattcttctggctggtcgctgccgctctgttattggcagggtgtgcaggcgaaaaaggcattgtcgagaaagagggatatcagcttgatacccgacgccaggcgcaggcggcgtatccgcgcattaaagtgctggtgatccactacaccgcagatgattttgatagcagcctggcgacactgaccgataagcaggtcagcagccattatctggtccctgcggtaccaccgcgatacaacggtaaaccgcgcatctggcaactggtgccggaacaagaactggcctggcatgcggggattagcgcctggcgcggggcaacgcgccttaacgacacctctattggcattgagctggaaaaccgtggctggcaaaaaagcgccggagtgaaatattttgccccgtttgaaccggcacagattcaggcgcttattccactggcgaaagatattattgcccgttatcacatcaagccggaaaacgtagtggcacatgcggatatcgcaccgcagcgcaaagacgatccggggccattatttccctggcagcaactggcgcagcaggggattggtgcctggccggatgcgcagcgggttaacttttaccttgccgggcgcgcgccgcacacaccggtagataccgcgagtttgctggagcttttggcgcgctacggttatgacgttaaacctgatatgacaccgcgcgagcagcggcgcgtgattatggcattccagatgcatttccgcccgacgttatataacggcgaagcggatgcagaaactcaggcgattgccgaagcattgctggagaaatacgggcaggattaacgcggcagttttccgtggtcgcgtagccaggcggcagttttctcgataccttcatccagggtgatgaccggctgataacctaactcttcctgcgcacgcgtaatatccagcgtaaagtcaaaattcaacttggagacgccgtagtgggtcagcggcggctcttttgcactcttgcggcctaaacgctccatgctgcgggcgatcatatccagcatcgggtaggggacggaacgaatacgacagtcaatattcaactcgtcgatcagcttctgcacgatgctgcgcagtgtgcgatgctcgccgttggtgatgttgtacacacgcccggaaggtagcttatcgcaggcttcctggcttgccagccacattgcgtgcacggcattttcatagtaggtcatatcgaccagcgcactgccgccatgcggtaacagaatactgccgtagtggtgcatcatatgcgccagacggggaataaagactttatcgtgcggtccgaacagactttgtgggcgcagaatagtaaagcgcgtttgtggattcgcctggctaagcatattgatcacttcttcgctggctgctttgctgcgggcaaactcgttggcgaagcggtgagggcgaaaatcttctttaatatcgcgatggtggtgataatcgaagtacagggagggggaagagatatgaataaagttacgcacaccccaggcgacagcccattcacccaggcggcgagtggcgcgaacgttagccagatcgaaagcctgttgtgtcccccagggactggtaaagctggagcagtgccacagcgtatcaatgcccgcgagcatcactttagcttgactactaaccagctcggtcagatccgccggaacaaactctgcgcccattttttccagcaatttgcccattgcctcgttgcgaccggtcgctcgcacgctgatgcctttctggcataaaaactctaccgcgtttcgacctaagccgctggtggcgccggtaaccagtaccttcatatcaatccactgttgttgagaaaataacgtgcgcattcttccgtgatttcccccatgatgcaatgggaaacatgaaagaataacgcaggttttgtcgattaatctgtgctttgttctgccagtctggcgatttgttttgccattccgcgaaaaataaacagatgcgcggggatcatcaataaccagtaaaacagccccggcataccgtgcggatgccagaaagcgcggacatcgatagtacgatagtcgcctttatcttccaggctaaaacacagtcgtcccagccccggcgctttcatgccaaataacaacgtaagttgtttttccggttcaacgacaatcactttccagctatccaccgcatcgccagtctgtaaatattcgcgctccgggcggcctttcgccagcttatgaccgatcgcgcggtccatcaacgcccgtgtctgccacaaaatattgccaaagaaataacgctctttaccgccgatttggttcactacctgccataaagcagcaaggctggcggacgttttaacggtaaaccccgcctgtttggcaaaataaccgtactccggtcgccagcgggcaaaggcctgagcgtcgtagccccagtcgctggagttgaccagtttttcctcctctttcaacgtgctacgtaccgcgtcatcgaaagcgatcagccgttgtgggatgagtgcacgtagcgcggtatcatccgccagcagatcgtgtttcagcccctgaatcaacgccctggcggtggtgggcggtacggaagtaatcacattgagaaaccacacgctaatccagcgggtggggagggggatggggatcaaccagcggcgcttaccgctcaccgccataaaatgttcaaactgttgctgataactgagcacctctggtccggcggcttcgaagatgcggtgttcgctggccggatgatctaacaacgcaaccagatagtgcagcaagttttccagcgcaatgggcgtggtgcgactacgaacccagcgcggaggcgttaagactggcaggttgtagaccatatcgcgcatgacttcgaacgccgcggaacctgcgccaacgataattccggcccgcagttcggtcacgggtacattcgcttcacgcagaatgtccgccgtagcctgacgagcacgcagatgatcgctctgctcatgtggcggggcctgcaagctactaagaaagattaattgcttaactggtacttcacgtagcgcatcgcggacgttgagagccacctggcgctcctgagcgataaaatcgccgccttcgcccatgctgtgcaccagaaaatagaccgtatcgatatcctgcaacagggccggtaggttatccggccagctgagatcgactttatggcaactgacgtttgccagttgcagctttgcaagcctgtcgacatgacgtgccgccgccaggatctgatgcccttgctggctgagtgtgcgcaccagatgctgaccaatgtagccactggcaccgagaactaaaatgcgttgcggcacgtctctctccttaacgcgccaggaatgcacgccagtgggcggcgacttccgccagttgttcgcggctgacgtcaagatgcgtcaccaggcggacaatcgggctggcgttaatcagcacgtttctcgctttcatgtattcgcctaacgcggcagcattttcttccccgacgcgaacaaacagcatattggtgtcctgacgcatcacatccgcgcctgcttcacgcagctgctccgccatccaggcagcgttgtcgtggtcttcctgcaagcgcgcaacgttatttttcagggcatatatcccggcggcagccagaatgccggactggcgcatcccgccacctgtcattttccgccagcgaatggcacgtttaatgtaatcacgattaccgacgagtaaactaccgactggcgtcccaagacctttgctcaggcaaatggtgaagctatcacaatattgcgtgatctctttcagttcgcagccgtaagccaccacggcattaaagatgcgcgcaccgtcaacatgcagcgccagattgcgctcgcgggtaaattcccatgcttctttcaggtattcccgcggcaacactttgccgttgtgggtgttttccagactgagtaatttggtgcgggcgaaatggatatcgtcgggtttgattttcatcgccactttatccagcggtagcgtgccgtcggcagccgcgtctatgggttgcggttgaatactgcccagcaccgccgcgccaccggcttcaaacagatagttatgcgcggcctgaccgacaatatactcttcgccgcgttcgcagtgactgagcagagcgaccaggttggcctgagtgccggtaggcagaaaaatggcggcttctttaccggaaagctctgctgcgtagtcctgcagagcattaacggtagggtcgtctccgtaaacgtcgtccccaaccggggcggccatcatcgcttcgagcatggcgcggcttggtcgggtaacggtatcactgcgtaaatcaatcatggcatgtccttattatgacgggaaatgccaccctttttaccttagccagtttgttttcgccagttcgatcacttcatcaccgcgtccgctgatgattgcgcgcagcatatacaggctgaaacctttggcctgttcgagtttgatctgcggtggaatggctaactcttctttggcgaccaccacatccaccaacaccggaccgtcgatggagaaggcgcgttgcagggcttcatcaacttcagacgctttttctacacggatacccgtaatgccgcacgcttcggcaatgcgggcaaagtttgtgtcgtgtagttcggtgccgtcagtcaaatagccaccagctttcatctccatcgccacaaagcccagcacgctgttgttaaagacgacaattttcactggcagtttcatctgcactacactgaggaaatcgcccatcaacatgctaaaaccgccatcgccgcacatggcgaccacctgacgttctggctctgtcgcctgcgcacccagcgcctgcggcatggcgttagccatgctaccgtggttaaagctacctaacaggcgacgcttgccgttcatttttagataacgtgccgcccacaccgttggcgtaccaacgtcacaggtgaaaatagcgtcatcggcggcaaaatgactaatttgctgcgccagatattgcgggtgaatggctttctcgctcggtttagctaaatcgtccagccctttgcgggcgtcgcggtaatcttccagcgctttatccagaaacttgcgatcggctttttcttccaccaatggaagcaatgcacgcagagtgctcttgatatcgccgaccagtgccatatccaccttgctgtgagcgccgatgctggctgggttgatatcaatctgaatgattttggcatcggtcgggtagaaggcgcggtagggaaattgcgtgccgagtagcactaacgtgtcggcgttcatcatggtatggaaaccactgctgaagccgattaacccggtcattccaacatcatacggattatcgtattcgacatgttctttaccgcgcagggcatgaacaataggcgctttaattttcccggcaaactcaactaactctttatgcgcccccgcgcagccgctgccacacatcagggcgatattgctggaataacgcagcagttgcgccagtttgcgtaactcttcttcttccggcgtcacgactggttgtggcgcatgataccagtgcatggttgccccttctggcgcaggttttaacgccacgtcgcctggtaacacgacaacgctaacgccacggttaagcaccgctttgcgcatggcaatcgccagtacttgtgggatctgctccgggctggaaaccagctcgcaatagtgactacattcgcggaatagctcttgtgggtgggtttcctggaaatagccgctgccaatttcgctggagggaatatgagcggcaatcgccagtaccggaacgtgattgcggtggcaatcgaacaggccgttgattaagtgcaggttgccggggccgcagcttccggcgcagaccgccagttctccgctaagttgtgcttcagcgccagcggcaaaggccgccacttcttcgtggcgggtggacatccactcgatggtgcccatgcgattaagactgtcactaagaccgttcagagagtcgcctgtgactccccagatgcgtttcacccctgcgctttcgagtgttttggcgatataagctgcaaccgtttgtttcatggttctccatctcctgaatgtgataacggtaacaagtttagttcatctgacggagggggaagggatgggagagaaaggaggcactaacggttaaatagcccgatgaaaggaatatcatcgggcataaggcgattatgcgagaaccaaatccccctgcggatggcaggagcaggccagtacgtaaccttcagcgatttcggcgtcggtcagcgtcattgtgctgctcaccgtatattcaccggaaaccacttttgtcttacagcagccgcaaacacccgcacggcaggcagcgacaaccggaacgttattgctttccagcgcctccagtagcgtggtgccaaccggggcgtaaaattctcgtgccggttgcagtttggtgaatttcagaccgctggtcgccgcttctgctactggggtgaagaatttctctttaaagaaacgcgtcacgccgagcgctttcacttcctgctctacccaatccatatacggagccgggccgcaggtcatcacggtacgactagctaagtcaggtacacctgccagcagttcgcgagtgagacgaccagcgataaagccttcggtaacgttattttctgccaccagcgttaccggatagttacgccactcatcggcgaaaataacatcctgcggcgtacgcacgttgtagatcacccgcacatcggcctgtggacggttcttcgcaagccagcgacgcatgctcataatcggcgtgacgccgcagcctgccgccagcaacaggaatttatcttctgctttatcgtcgcaggtaaattcccccatcgcgtcgctaagccagagataatcaccgcgttttacatcgcgcgtcagccactgggagccgacaccgtcatcaatccgccgcacggtcagggtgatatattcactcacgcctggcgtggaggaaatggtgtaagcacgcagcgtttccgcactgtttcgcacgctgaccagtgcatattgcccggcgcgatatgggtagtaatcgtggcaaatcagggaaatcgtccacacatccggcgtttcttgcgtaatgtgatgaacctgcatccgccacgggcattgattcgttggcatcgtcatcgacaaactccttacgcgctcaacagttgcttcatgtcttcttcaacagtggtgatagaacgcaggccgaatttctcgttcagcaccgccagcaggtctggtgtcaggaaaccaggtgcagtcgggccggtgacgatatttttcacgcccagagaaagcagcgtcagcagaatgacgatcgctttctgttcaaaccaggagagcaccaggctcagcggcagatcgttgacaccgcagcccagtttctctgccagagtgacagccagaataatcgcactgtaagcatcgttacattgacctgcatctaccagacgcggcagaccttcgatatcgccaaactcaagtttgttaaagcgatatttaccacaggcgagggtcaggatcaggcagtcatccggcacgctggtggcgaaatcggtgaagtagtggcgctcgccgcgtgcgccgtcacagccaccaagcaggaagatatgacgcagtttttcacggctcaccagatcaatcagcgtatcagcagcgccaagcagcgtctggcgaccaaaacccacggtgataaggtgcggaatttcgctgtacgggaagcctgccatctgttgcgcctgggtgataaccgcagagaaatcatcaccgtccagatgacgcacgccaggccagccaacaatgctgcgggtccagatacgatcgtcataagcgcctacggttgggtcgatgatgcagttgctggtcatcacgatggggccagggaaacgagcgaactccacttgctgattctgccagccgctgccgtagttaccgaccagatgcttgaatttacgcagctccgggtagccatgcgcaggcagcatttcgccgtgggtgtagacattaacgcccgtgccttcggtctgttccagcaggttgtagagatctttgagatcgtgaccggaaatcagaatgcatttacccgccgtcgctttgacgttgacctgggttggcgtcgggtgaccgtatttaccggtttcgcctgcatccagaatgctcatcactttgaagttcatctggccgatttccatactacactcaagaagcgcgttcatatcggcaggccaggtccccagccacgccatgattttatggtactgggcataaatatcgttgtcgtattgaccgagaacatgcgcgtgttccatataggccgccgcacctttcaggccatacaggcacagcagacgcaggccgagaatgttttcgccaatcgccgctttatctttgttaggggtaaattctgctgcctgacgttgcagctcgccgagatcgtcgctcaccagttgcaggtcagccatcgggttatcgacgcgcgcgttggcatctacagccaggcattgcgctttcagcgcctcgcgcagggcaatcgcttcacgagcgtagccgacaatacgcggagaatcgaagttaacgttggtcagggtactgaaaaaggcacgtggcgcgaagctgtcaacatcgtggttgatgatgccgtattcacgcgcttttaccgcccaggcagaaagcccttgcagcgccgcgatgagtaaatcctgaaggtcagaagtttccgccgttttaccacacatcccctgcgcgtaactgcagccgtttcctgccggagtacggatagtttgttcacattgcacacaaaacatgatcacaccttttaaagttatatttaatatacatgtttaaggttaagacgcttaacgcggggataaaagggatttttcatgcaactttaagggagattgatttagcgcaattttggcggcagggatctaccgccagagaggtattacgcagagaaaaaggcgatgaggatcggcactaacaggctaagaataaaaccgtgaacaattgccgccgggaccatatccagcccgccagtacgttgaagaacgggcagggtgaaatccatacttgtggcaccgcataagcccagtgcagtagagcggctgcggcgaatcagcccagggatcaacataatagcaatcagttcacgggccagatcattaaaaaacgccgcgctcccgattaccggaccaaaagattcggtcaataaaataccggaaagagaataccagccgaaaccggaggccattgccagcgcggtattgatggggagatcaagaataaaggcgttaattaaaccaccaattaaactactgacaaccaccaccacggcgacaatcattccccggcgattaaggacaatctgctttaaggtcatgccattattgcgcaactgaataccaacgaggaaaagtagcaaaattaacgtgtattcactggcttcggtcgcgtgttgtaagaaagccagtccacttagaccaatggcaaaaccaatcactactacgccgcacagttttaggctctccagcgccatcgcaatacggctcgggagtttttcttgctgatggtggttgcgccacggcaggcctcgctccagccacatcagggcggcaatattacacagtaaaataacggtaatactgacggcagaataatgcagaatcgccaacaggttactggcgaggttatcgagaaacgccagactgatacccataaaaaagagaataaggtaaaccatccagcttaatagctgattaataacttttaacgcagcttgttggcgaagcggaatgaggtaacccacaatcaggggaaccagaatgattaacagcccagaaaacatgaaaacccagtccttgcaaagatgaagtcgaaatgcgcgatgacacactactgaaagcggaaggacgagtaaagttgcaattaaaaggaaatgttatgcataaggagcagtagagtattcgttttcatttaaagatattcttgcgctttaattacaaactgcaccgatgttggtggcgtcaaaatcgccgaggcgttccctgaaggccggggcagcccacatggatgtgggctgagggcgcgttttacagggatgttacctcgcgcccgacccggtagccgtaagggataagtcgagggcaccgcgcagcggcgattttgttcgccagagcccgggggtgcagggggcggcggcgattggccgccccctgcgcgctccttgcgccagtggcaatatgttgcttagctcatgaaaggagcgcaacaagatgatgaatcaacatataacaacatcttaaaaaaaggcctgacattacgccaggccttctgcgttaattaatcacgcttttccagcagggtccggtaaatcagaccaccgataatgccgccgacaattggcaccacccagaagaaccacagttgttctaatgcccagccgccctggaagatagcaaccgcggtgctgcgcgccgggttaacagaagtgttagtcaccggaatactaattaagtgaatcagggttaaggccagaccaatagcgatcggcgcaaaacctgccggcgcgaatttgtcggttgcgccgtggatcaccaacaggaaacctgcactcaataccagttcaactaccagcgcggaaagcatggaataaccgcctggactatgctcgccataaccgttagaagcaaaaccgctggctgccgcgtcaaaacccgttttaccactggcaattaaatacagcagcgccgctgcaacaataccgccgacaacctgggcaattacgtagccaacgacttcttttgccggaaaacgtccgccagcccataaaccaatagtgaccgccgggttaaaatgaccaccagaaatatgaccaacagcaaaggccatcgtcagaacggtcagaccgaacgccaacgccacgccggcaaaaccaatgcctaattccgggaagcctgcggccagtacagcactaccacagccaccaaaaacaagccagaaagtaccaaaacattcagctgctaattttctgaacatatccaccacaattaaaaattgaccctgtgaaaaatatggtcgttttatagggtcgtcgtaaaaaagtgacgacggaaataatgcgcggctattttaaaaacgaaggcgagtcattcaccagataaataaatccagtaaatttgatttagggcaacagcgggttgccccatatagtcatttgtctgattgacagtgtagtgcacgcaaaagatttaatcctttaggcgtaataaaaaataatttatcatgctaattatttgattttgttgtttttgcagacttatcagcaagagggagtataacgcgattattcgctcatttttcagacatttgccatgcttaaatgtgatgtcatcacgtattagcaaggcctttcccgttatactgccagcgtaaaggataagtcacatatttctggaggggatatgattcttgagcgcgttgaaattgtgggttttcgcggtatcaaccgtttgagcttgatgctggaacaaaacaacgtcctgattggggagaacgcgtggggtaaatccagcttgctggacgccttaactctgctgctaagcccagaaagtgatctctaccattttgagcgcgacgatttctggttcccgccgggagatatcaacgggcgagaacatcatctgcatattattttgaccttccgcgaaagcctgccaggccgacatcgggttcgccgttatcggccgctggaagcgtgctggacgccatgcaccgatggctatcaccgtattttttatcgtctggaaggggagagtgcggaagacggcagcgtgatgacactgcgcagttttctcgataaagacggacatccgattgatgtcgaggatattaacgatcaggcacgccatctggtgcgtttaatgccggtgctgcgcttgcgtgatgcccgttttatgcgccgtattcgtaacggcacggtgccaaatgtccctaatgtggaagtcaccgcgcgccagctcgatttcctcgcccgtgagttatccagtcatccgcaaaatctctctgatgggcagattcgtcagggactttccgcaatggtacagctgcttgagcattatttctctgagcagggggccggacaggcgcgatatcgtttaatgcggcggcgagccagcaatgagcaacgaagctggcgctatctggatatcatcaaccggatgattgaccgacctggtgggcgcagctatcgggttattttgctcggcctatttgctactttgttgcaggcaaaaggcacattgcgactggataaagacgcccgtccattgttgctgatcgaagatccagaaacccgtttacaccccattatgcttagtgttgcctggcatctgttgaatcttctgccattgcagcgcattgccaccaccaacagcggtgagttgcttagcttaacgccggtagagcatgtttgccgactggtacgtgagtccagccgcgttgccgcctggcgtctggggccgagtggcttgagtaccgaagatagccgacgcatatcctttcacattcgttttaaccgtccgagtagcctgtttgcacgctgctggttgctggtggaaggggaaacggaaacctgggttatcaatgaactggcgcgtcagtgcggacatcattttgatgccgaagggatcaaggtcattgagtttgcccagtccgggctaaagccactggttaaatttgcccgccgaatggggattgaatggcatgtactggtcgatggcgatgaagcagggaagaaatatgccgctacggtacgcagcctgttgaataacgatcgggaagccgaacgagaacatttaacggcgttaccggcgctggatatggaacattttatgtatcgccagggattttccgatgtgttccaccgcatggcgcaaatcccggaaaatgtaccgatgaatctacgcaaaattatcagcaaagcgatccatcgctcttccaaacccgatcttgccattgaagtggcaatggaggcaggacgtcgtggtgtggactccgtaccgacgctgctgaaaaaaatgttcagtcgcgtgctgtggctggcgcgcggtcgcgcggattaaccgcgaaacatcgtggccatttgtggctgaatagcgtcgagcatctcatagcgccgacggtattcagcccgttttttactggcgatttcggcaatctcttttcgtgctatctgtgctggaaggcggtaatggcgttcagcatcacatacgccgccaacgctttcccagaaagcgttgtaatcagcgtggatcttgccttctttatcgcgataacgcaggctgcggtaaatatgcgtttcattgctgacggcaataatctgctctacctgcaaacgttgggcaaacagacaggccgcttccatcacgaggcgtttgggaaatagcccgtggcaggctttcgtcgcattctggatttcctgatgtggaatttcccattttgcgccttgcagtccgccaataaacatcgttcttttcccctgatattcacacagggtaaacgtgatctctgccagaggaataccttcgctgttgcggaacaggattgtgctgtcaccttctttatccatactgatcatcatggtcagctcaagcgtgaactgctcgccgtttttgccttccagcttcgccagttgcagcccgggggtattcaaatataagctgaattcttccgcgctcatacattcgcggagtaacgcataatggtaacgtaacgcctccagcaattgcttacggctaagattcgccgcaaggtaagggcgatgcagacgcacaggcagtcgcggctggcgcgttaacaatacattgagattaggccagtgggaaagttcgttcatccactcaacgcttaaacgcggcataatcaagctgcgcagcaaaaatttctggcgaaaactacggcgatgccagaatttacccggccgacactgtccacgtgccagactaagaaaaagactcaggctgctgagagattcagatggcgtaaaggtccgttcagttagctggctcatattcatgaaatcaatggttatacatggcgtgcttttcaccattgcgtatcttaaccaaacatcaatagtgtgattactaacgtaaattttagggttttgttgatatttcgttgaagttaatgacccggattggcatatggagtattcagaaaatttatgaaaaagcggaaaaccgtgaagaagcgttacgttattgcgctggtgatagtcatcgccggactgattacgttatggagaattcttaacgcacccgtgccgacttatcagacgctgattgtgcgccccggtgatttacagcaaagcgtgctggcgaccggaaagctggacgcgctgcgtaaggttgatgtgggcgcgcaggtcagcggtcagttgaaaactctgagcgtggcgattggcgataaagtaaaaaaagaccagcttttaggggttattgatcctgaacaggctgaaaaccagattaaggaggtcgaagcaacgctgatggagctacgtgcgcagcggcagcaggcggaagcggagctgaaactggcgcgggtgacgtattcccgtcagcaacgtctggcacaaacgaaggctgttagtcagcaggatctcgacaccgccgcgacggagatggctgtgaaacaggcgcaaattggcaccattgacgcgcaaatcaagcgcaatcaggcttctctcgatacggctaaaaccaatctcgattacactcgcatcgttgccccgatggccggggaagtcacgcaaatcaccactctgcaaggccagacggtgattgccgcacaacaagcaccgaacattctgacgctggcagatatgagcgccatgctggtaaaagcgcaggtttctgaagcggatgtaatccacctgaagccggggcaaaaagcctggtttacggtgcttggcgatccactgacgcgctacgaggggcaaatcaaggatgtactaccgacgccggaaaaggttaacgacgctattttctattacgcccgttttgaagtccccaaccccaatggtttgctgcggctggatatgactgcgcaagtgcatattcagctcaccgatgtgaaaaatgtgctgacgatccctctgagcgcgttaggcgatccggttggcgataatcgttataaagtcaaattgttgcgtaatggtgaaacacgcgagcgtgaagtgacgattggcgcacgtaacgataccgatgttgagattgtcaaagggcttgaagcgggcgatgaagtggtgattggtgaggccaaaccaggagctgcacaatgacgcctttgctcgaattaaaggatattcgtcgcagctatcctgccggtgatgagcaggttgaggtgctgaagggcatcagcctcgatatttatgcgggtgagatggtcgcgattgttggcgctagcggttccggtaaaagcaccctgatgaatattctcggctgtctggataaggccaccagcggcacctatcgcgtcgccggtcaggatgttgccacgctggacgccgatgcgctggcgcaactgcgccgcgagcatttcggctttattttccagcgttaccatttgcttagccatttaaccgccgagcagaacgttgaagtacccgccgtctatgctggtcttgagcggaaacagcgactgcttcgtgcccaggagttgctgcaacggctggggctggaagaccgtacagagtattatccggcacagcttagcggtggtcagcaacagcgcgtcagcatcgcgcgggcattgatgaacggtggtcaggtaattcttgccgatgaaccaaccggcgcactggacagccattctggcgaagaggtgatggcgatcctgcatcagctgcgcgatcgtgggcatacggtgattatcgtcacccacgatccgcaggtcgctgctcaggccgagcgggtgatcgaaattcgcgacggcgaaattgtgcgcaatcctcccgccattgaaaaagtgaatgttactggcgggacggaacctgttgtcaacacggtgtctggctggcggcagtttgtcagcggttttaacgaggcgctgacgatggcatggcgggcgctggcagcgaataaaatgcgtactttactgaccatgctggggattattatcggtattgcgagcgtggtttccattgtcgtggtgggtgacgccgccaaacaaatggtgctggcggatattcgttctattggtacgaatactattgatgtctatcccgggaaagattttggcgatgacgatccgcaatatcagcaggcgctgaagtacgacgacttaatcgccatccaaaaacaaccgtgggtcgccagtgccacacctgccgtcagccaaaacctgcgcctgcgttataacaatgttgatgttgctgccagtgccaatggcgtgagcggcgattattttaatgtctatggcatgaccttcagtgaaggaaacacctttaatcaggagcagctgaacggtcgtgcgcaggtcgtggttctcgacagtaatactcgccgccagcttttcccccataaagcagatgtggttggcgaggtgattctggtcggcaatatgcccgccagagtcattggtgtggcggaagaaaaacagagcatgtttggtagcagtaaagtgctgcgtgtctggctaccttacagcacgatgtccgggcgagttatgggccagagctggcttaactccattactgtcagggtgaaagaaggatttgacagcgccgaggcggaacagcaactcacgcgtttacttagtctgcgccacggaaagaaggatttctttacctggaacatggacggcgtcttgaaaactgttgaaaagaccacacgtactttacaactgtttctgacgctggtggcggtgattagcctggtggtgggcggtattggtgtaatgaatattatgctggtgagtgtgaccgagcggacgcgggaaattggcattcgcatggctgtaggtgcgcgagcaagcgatgttttgcaacagttcctgatcgaagccgtactggtttgcctggtcggtggcgcgttgggaataacactgagtctgttaattgctttcaccttgcagcttttcttacccggctgggagattggttttagtccgttggcgctgctgctggcgtttctctgcagcacggtcaccgggattttatttggctggttacccgcacgaaatgcggcacgactggatccagtagatgctctggcacgagagtaatttttgagataaaaatgccagccgatcgggctggcattttgcctttaggatgtacacaatgagacagaagagttatgcgactgccgcttctacttcgacgggcacaataacactggcgtgattgccttttggcccctggtggacatcaaactgaacggattgtccagcttttagcgttctgtaaccatccatctgaatggtggaataatgagcgaaaatatcttcgccgccgccttcagggcagatgaaaccaaaccctttggcattgttgaaccacttaacagtacccttttccatgcttcgacatccttcgcaaatcttatacaagtaagatggaataaaccggggtcagagagggggctgttcaaaacctcgccaactctagaaatacaatttagagaattagggcgagccgtcaagcatttgacaggggacaaggggcaggtatgaatcaaaaatttgaagcagttaacgctattgacaggaatgtgacagatgtcgctgatgccaacgatagatgatagttatctatcatgtggagtagattggtcaggcaaataagctcttgtcagcggcagggcgttctgccgataaccgtaaccgaagatgataactgacaatgggtaaaacgaacgactggctggactttgatcaactggcggaagaaaaagttcgcgacgcgctaaaaccgccatctatgtataaagtgatattagtcaatgatgattacactccgatggagtttgttattgacgtgttacaaaaattcttttcttatgatgtagaacgtgcaacgcaattgatgctcgctgttcactaccaggggaaggccatttgcggagtctttaccgccgaggttgcagaaaccaaagtggcgatggtgaacaagtacgcgagggagaatgagcatccattgctgtgtacgctagaaaaagcctgaatgcaggcataaaaattgggggaggtgcctatgctcaatcaagaactggaactcagtttaaatatggctttcgccagagcgcgcgagcaccgtcatgagtttatgaccgtcgagcacttgttactggcgctgctcagtaacccatctgcccgggaggcgctggaagcgtgttctgtggatttggttgcgctccgtcaggaactggaagcctttattgaacaaaccacacccgttctgcctgccagtgaagaggagcgcgacacacagccgacgctgagttttcagcgtgtactgcaacgtgcggtcttccatgtccagtcctccggtcgcaatgaggttaccggtgcaaacgttctggtcgctatctttagcgaacaggagagccaggcggcatatctgttgcgtaaacatgaagtcagccgtctcgatgtggtgaactttatctctcatggcacgcgtaaagacgagccgacacagtcttctgatcctggcagccagccaaacagcgaagaacaagctggtggggaggaacgtatggagaatttcacgacgaacctgaatcagcttgcgcgcgtgggcggaatcgacccactgattggtcgtgagaaggagctggagcgtgctattcaggttctctgccgtcgccgtaaaaacaacccgctgctggtgggggaatctggtgtcggtaaaaccgcgattgcggaaggtcttgcctggcgaattgttcagggcgatgtgccggaagtgatggctgactgtacgatttactctctcgatatcggttctctgttagcgggcacaaaatatcgcggcgactttgaaaaacgttttaaagcgttgctcaagcagctggagcaggacactaacagcatcctgtttattgatgagatccacaccattatcggtgcgggtgcagcgtctggtggtcaggtcgatgcggctaacctaatcaaaccgttgctctccagcggtaaaattcgtgtaattggtagcacaacctatcaggagttcagcaacattttcgagaaagaccgtgctctggcgcgtcgcttccagaaaattgatattactgaaccgagcatcgaagaaactgttcaaatcatcaatggcctgaaaccgaagtatgaagcgcaccacgacgtgcgttataccgcaaaagcggtgcgtgcggcggtagagctggcggtgaaatacattaacgatcgtcatctgccggataaagccattgatgttatcgacgaagcgggcgctcgcgcacgcctgatgccggtaagcaaacgcaagaaaaccgttaatgtggcggatattgagtccgtggtggcccgtattgcacgcattccagagaagagtgtttctcagagtgatcgtgataccctgaaaaacctcggcgatcgcttgaaaatgctggtcttcggtcaggataaagccattgaggcgctgactgaagccattaagatggcgcgtgcaggtttaggtcacgaacataaaccggttggtagcttcctgtttgccggccctaccggggtcgggaaaacagaggtgacggtacagcttagcaaagctttgggcattgagcttctgcgctttgatatgtccgagtatatggaacgccataccgtcagccgtcttattggtgcgcctccgggatacgttggttttgatcagggcggtttgctgactgatgcggtcatcaagcatccacatgcggtgctgctgctggacgaaatcgagaaagcgcacccggacgtgttcaatattctgttgcaggtgatggataacggtacgctgaccgataacaacggacgcaaagcagacttccgtaacgtggtgctggtgatgaccaccaacgccggggtacgggaaactgagcgcaaatccattggtcttatccaccaggataacagcaccgatgcgatggaagagatcaagaagatctttacaccggaattccgtaaccgtctcgacaacattatctggtttgatcatctgagtaccgacgtgatccatcaggtggtggataaattcatcgtcgagttgcaggttcagctggatcagaaaggtgtttctctggaagtgagccaggaagcgcgtaactggctggccgagaaaggttacgaccgggcaatgggcgctcgtccgatggcgcgtgtcatccaggacaacctgaaaaaaccgctcgccaacgaactgctgtttggtagcctggtggacggcggtcaggtcaccgtcgcgctggataaagagaaaaatgagctgacttacggattccagagtgcacaaaagcacaaggcggaagcagcgcattaatctgattgttaggtaggttggtcaagtccgtaatctcgaaagaggttacggactttttgtttatggggtggaggaggttcagaccctttttttaatgatgatggtaagttgttgataattagtgctgcgggaaggtaaggataaaaaagggtgctgcaggagaatgggatggttttgctttattaacaacgggctaaacgtgtagtatttgagttcactgccgtacaggcagcttagaaattcacaggtaacatactccacccgcccaccatgttcactgccgtacagacagataaaatgcgaaaaaaaagctcgcactttcgtacgagctcttctttaaatatggcggtgagggggggattcgaacccccgatacgttgccgtatacacactttccaggcgtgctccttcagccactcggacacctcaccaaattgttttgctaccaaacctcatgggtggcaacggggcgctactatagggagttggagtaaaacggtcaagaagaattttaatgataattattgtttgctcatactgtaaacaagttgtgcagtatatctacatcgagacaagttacggacttatacttccaaagtacttcatacatatcacaaaataaaaaggccggttaaaccgaccttttactcgttctttctcttcgcccatcaggcggtaaaacaatcagcgactacggaagacaatgcggcctttgctcaggtcgtacggggtcagttcaacagtcactttgtcgcccgtcaggatgcggatgtagtttttgcgcattttaccggagatgtgtgcagtaaccacgtgaccgttttctaactctacgcggaacatggtattaggcaacgtttcaagaacggtaccttgcatttcaatattgtcttctttggccatctaatcctctggggtatcactaccgtaatttgaaccggcaagataatgccgaagttctgtaaataagtaaagatttgcgcgctaaatcgcaacaaacaggttcggcacattactccgaaaacacacggctaagccgcaccaaaagcgcaacgtataagggagcggtgagataaacgatgggcgttacctgacgcgaaaaattccttatcggcagcggggtaatgagcgtaaccaactctgcgaccgcaattataacactctggggagaaatgtgccgaaaacattcattcttgtggactaaacaagcatcgtggtacccagaaattattcggcaatcgtccgaggcgcatttgattgagataattaaggtaatcccggcggggaatttcgcaggcaccaaggcttgctgtgtgatcgttaaggacctggcagtcgataagcttaccgccatgaccgataaattcctcacagaataccagaagcgccgttttagacgcattttccatccggctgaacatggactcgccacaaaatagcgttccctgggccacgccgtacataccgccgacaagctcatcttcacgccagacttcaatggagtgggcatggccgagttcgtgaaggcgatggtaggcttcgaccacgccacgcgtgatccaggttccttcttcgcgatcgctggcacagccttcaatgacctgaccaaaagcgtaattcatcgtgacacgataggggctgcgtttatgaaatcgcttcatactacggctgatatgcagactttctggccatagcaccgcgcggggatcggggctccaccagaggatggggtcgcctggagaaaaccacggaaaaataccacgctggtaagccattaacaggcgcgcagggctaagatcgcccccaagtgccagcaggccgttaggctcacgtaatgcgccttccggggaagggaaggctatactatggcgagaaagctgaaccaggcgcatgaccgcaaaactccacgcaagtcggatcgttcaataatagcttacaaaccctgcttgaactggtaataacgcccctgtctggcaagcagttctgcgtgagtaccttgctcaataatttgcccgttgtccatcactattatttgttggaaacgagagagtccgcgaagtcgatgggtgaccattaacaccgttttctcacgcatcatttctgcaagcaattcaaggatctggctttcggttgtggcatctaagccttcggtaggttcatccagcaacaccagtggcgcatcatgtaacagcgcacgggcgatagccagacggcgcagttcaccaccggagagctggcgtccgccttcacctaaccaactgttgagacctgcatcctcgagcagcttttccaggccaacgcgacgcaagatctcgctcagagcctcatcactactgccagggctggcgagtaaaagattatcacgcagcgtggcgctaaacagatgcactcgctgaggaacaacgctgatggtctgtcgtagagccgcttcattcaggctggctatggggctatcgttaagcaaaatctcgccctgttgcgggtcccatgcgcgggtcagctgttgtaacagtgtacttttgccgcatccggttcgcccgagaatcgctatatgttccccggcgtttacctgaagagaaatccctttaagtgcctgttgagattgctccggataagtgaactgaacatcccgtaacgtcaggctaacgcgatcggcaacacgagtttgggtatcaggaaaggtgacctccggtttttgatccgttaagtcagagatacgtacggcagaggcaatgacttgccccagatgctgaaatgcacccgttactggtgccagtgcttcaaacgcggctaacgcgcagaagacaaacagggcaattaacgcgccgggttgagcattgccgccaacgccgccagacgccatccacagcatcaggatcaccgctaacgcgccaatgagcagcattatcgcttggctcaatgcggtcagttcagattgacggcgttgcgcttccagccattgaatttctgtattctctagttgcgtgcgataacgatcgctggcaccaaaaatggtcagctcagcttgcccttgcagccaggccgtcagttgttggcgatactgtccgcgaagatgagtcagattttgcccggtgctttttcccgcacgataaaacagcggtggcatcaggaaaagcgtcagtaacataatgccgcccagcgtaaaggcgagggtgaaatcaaggaaacttaacccgattgtcaccaccataatcaccacaaaagcgcccaccagcgggctgataacgcgcaggtaaagatgatcgagcgtatcaacatccgccaccacgcgattgagcaattcgccctgacgatagcgcgccagtccggcaggggagaggggcagcaatttgctgaaggtgtaaatgcgcagatgctgcaacacgcggaaagtcgcgtcgtgacttaccagacgttcaaaatagcgcccggcagtacgggtgattgctgcgccacgcacgcccgcagcgggtagcatatagttgaagctgtacagtccggcaacccccgcaaccgcactggcgctgaggaaccagccggaaagtgtcaacagaccgatactggcgagcagcgtcacaattgccagcacaataccaagacttaacatccatttatgacgtttatacagtgccagatagggtagcaaagcgcgcatttaaatctcctcctgacgatgggccagtaatgtggcgaatgggccaccagccacacttaattccgcgtaacgtccttgctcaataatccggccatcctgcataacccaaatgacatcccagtcagcaagatcttctaactggtgggtgaccattaacgttgtctggcgcagagaggcggcattcagcgcctccattacgcgctgttcactgtgagcatcaaggctggcagcgggttcatccaacagtaataggctacagggatttagtaacgcacgggccaccgccacgcgctgcgcctgccccacggaaaggcgggcagcctggtcgccaacaggcgtatcaacgccttgtgggaggagcggtagaaactcgctgacccaggcgttatccagcgctgcttgtaattcttgttcgctggcatcaggtcgcgccagtagtacgttatcccgcaatgttgctgccggtaattgtgggttttgcccaacccaggagagatgtttacgccaactttctggacttaaatcgcgtaattctatcccgttgattcgtaggcttccctgataactgagaaaaccagaaagcgcgttcagcagactgcttttaccactaccgctgcgaccaaccaacaccgcacgttggcctgctggcaaagtaaagttcagcggtccggccagcgttttaccttccgggctcgtgataaacagctcctcggcctcaatggtcaccggatcggtgcttgctaattccgcctcaccacgttgcggatgggcgagcggggtttccataaacgttttcagactgtcagctgcgccaacagcctgggctttagcatgataaaacgtaccgagatcgcgtaatggctggaaaaactctggcgcaaggatcagggccagaaaacccgcagccagcgtcacaccggtatcgtagtgaccaaaatccagctcgccgagataggaaaaaccaaagtagaccgccaccagagcaatactcaggctggtaaaaaattcgagaatgccggaggataaaaacgccagccgtagcacttccattgtccgttggcggaaatcttcgctagcagaacgaatactttcaatttcagcttcaccacgaccaaaaatacgcaatgtttccatgccgcgcaggcgatcgaggaaatgcccacttaagcgagcaagagcgagaaagttacgtcggttagcatcggcagcccccattccaaccagcgccataaacaacggaattaacggtgcagtgcccagcagaatgagcgccgcagcccagttagaggggaagattgccaccacaatcagcaacggcacgctcactgccagcgccatttgcggcagatagcgtgcatagtaatcatgcatatcgtcaatttgctcgagtaccagcgtcgcccagctccccgcaggtttaccctgaatccacgctggccctgcttgttgcagacggtcgagaacctgacggcggatggcaaagcggatatgctgcccggcgtgataacccacccgttcgcgtaaccagaccacccatgcgcgcagtacaaaggtcagaaccagtaacgtaaagggaagcagcagggcttcacggggaatattctccataatcatatgttgcagaattcgcgccatgaaccaggcctgggcaatgatcaatatgccgctcacaaagcccagcagacgagaaatattcagccaacgttgggagatgacgctttgctgttttaaccagcgggttaactctttttgacgagatttattcattgcacgcttagcaggtgagttatcagaattatttgcagagcaatgttacaacggggaaaaaataaaggcgacccatagtcgcatggtgtcgccttctttacttttgttactgatttgtaaaattattttgcgtcagctaaaccatcgaggtagcgttccgcatcaagtgctgccatgcagcctgtaccggcgctagtaatggcctggcgataaatgtgatccatcacgtcgcctgcggcaaagacgccaggaatgctggtctgggtggcattaccatgaataccgctctgtactttgatgtagccgttttccagttccagctgcccttcgaaaatcgcagtattcgggctgtgaccgatagcaacaaacagaccggcaacgtcgagactctcgatgttatcgctgttttgcgtatcgcgcagacgaacgccagtgacacccatttgatcgccggtcacttcttccagcgtacggttggtgtgcagaatgatgttgccgttctccactttatccatcaggcgcttaatgaggattttttccgcgcggaaaccgtcacggcggtgaatcagatgcacttcgctagcgatgttagacagatacagcgcctcttcaaccgcggtattgccgccgccgatgaccgcaactttctggttgcgatagaagaaaccgtcgcaggttgcacaagcagaaaccccacggcctttaaaggcttcttcagagggcaggccgagatagcgtgcagaagctccggtggcaataatcagcgcgtcgcaagtgtattcgccgttatcgccattcagacggaacggacggttttgcagatccaccttgttgatatgatcaaaaatgatctcagtttcaaacttggtggcatgttcgtgcatgcgctccattaataacggaccggtcagatcgtttggatcgccaggccagttttccacttccgtggtggtggtcagttggccgcctttttccatgccggtaatcagcacaggttgcaggttggcgcgcgccgcgtagacagcagcggtgtatcccgccgggccactacccaggataagcagtttactgtgtttggtcgtgcccatgagatccccatagttgttggcagacaatgggcaggattgtagggaatttacagacgtaaaaaaagagtatgacgattttgttaacaatttgtgcaatcggcagcatcgataagcaggtcaaattctcccgtcattatcacctctgctacttaaatttcccgctttataagccgattaaatgatgaataaacgcccctgttaatgaatatctggcatgttgtactaaaaatcgatgttttgctttgacaatcccctggtgttttgcgaaaacattcgaggaagaaaaaaaacagtattcttatatgcgcataaccatgcatgtaaataccatgtttaccgtgctagtgaaatctacgtatggcgtggacagacgccattcgtgatgtcgatagctgccacaaggcaacggtcttctcaccgtagacccaggcattgcgcgccgtgaatcttcatgatttcggtctatcgtgacgggtagcgactctgaacagtgatgtttcagggtcagacaggagtagggaaggaatacagagagacaataataatggtagatagcaagaagcgccctggcaaagatctcgaccgtatcgatcgtaacattcttaatgagttgcaaaaggatgggcgtatttctaacgtcgagctttctaaacgtgtgggactttccccaacgccgtgccttgagcgtgtgcgtcggctggaaagacaagggtttattcagggctatacggcgctgcttaacccccattatctggatgcaagtcttctggtattcgttgagattactctgaatcgtggcgcaccggatgtgtttgaacaattcaataccgctgtacaaaaacttgaagaaattcaggagtgtcatttagtatccggtgatttcgactacctgttgaaaacacgcgtgccggatatgagtgcctaccgtaagttgctgggggaaaccctgctgcgtctgcctggcgtcaatgacacacggacatacgttgttatggaagaagtcaagcagagtaatcgtctggttattaagacgcgctaacacggaacaggtgcaaaatcggcgtattttgattacactcctgttaatccatacagcaacagtactggggtaacctggtactgttgtccgttttagcatcgggcaggaaaagcctgtaacctggagagcctttcttgagccaggaatacattgaagacaaagaagtcacattgacaaagttaagtagcggccgccgccttctggaggcgttgctgatccttattgtcctgtttgccgtctggttgatggctgccttactaagctttaaccctagcgaccccagctggagccaaacggcctggcatgaacctatccataatttaggtgggatgcccggtgcgtggttggcagatacgctgttctttatttttggcgtgatggcttacaccattcccgtcattattgtcggcggttgttggtttgcctggcgtcatcagtccagcgacgaatacattgattattttgccgttagcctacgcatcattggcgttttggcgctcatccttacctcctgtggtctggcggcaatcaacgctgacgatatctggtattttgcctccggtggcgtcattggcagcttactaagcactacgctacaaccactgctacacagtagcgggggaactattgcgctgctctgcgtttgggcagcgggcctgacgttgttcaccggttggagttgggtgaccattgctgaaaaactcggcggctggattttaaacattctcaccttcgccagtaatcgtacccgtcgcgatgatacctgggtcgatgaagatgagtatgaagacgacgaagagtatgaagatgaaaatcacggcaaacagcatgaaagtcgccgtgcccgtattcttcgcggcgcgctagcgcgtcgtaaacggttggcggaaaaattcattaatccgatggggcggcaaacagacgctgcgttgttctccggtaagcggatggatgatgacgaagagattacctacactgcacgcggtgtggctgccgacccggacgacgtcctatttagcggcaatcgtgcaacgcagccagaatatgacgaatacgatccattattaaacggtgcgccaattaccgaacctgtcgctgtagcagctgctgctaccacggcgacacaaagctgggctgcgccggttgaacctgtgactcagacgccgcctgttgcctctgttgatgttccacctgcgcaacctacagtagcctggcagcctgtaccgggtccacaaacgggagagccggttattgctcctgcaccggaaggttacccacagcagagtcaatatgcgcagcctgcagtgcaatataatgagccgctgcaacaaccagtacagccgcagcagccgtattatgcacctgcagctgaacaacctgcgcaacagccgtattatgcccctgcgccagaacaaccggtggcaggtaacgcctggcaagccgaagagcagcaatccacttttgctccacagtctacataccagactgagcaaacttatcagcagccagccgctcaggagccgttgtaccaacagccgcaacccgttgaacagcagcctgttgtggagcctgaacccgttgtagaagagacaaaacccgcgcgtccgccgctttactactttgaagaagttgaagagaagcgagcccgtgaacgtgaacaacttgcggcctggtatcaaccgattccagaaccggttaaagaaccagaaccgatcaaatctagcctgaaagcaccttctgttgcagcagtacctccagtagaagccgctgccgctgtttccccgctggcatctggcgtgaaaaaagcgacactggcgacgggggctgccgcaaccgttgccgcgccagtcttcagtctggcaaatagcggtggaccgcgtcctcaggtcaaagaggggattggtccgcagttgccacgaccgaaacgtatccgcgtgccaactcgtcgtgaactggcgtcttacggtattaagctgcccagtcagcgtgcggcggaagaaaaagcccgtgaagcccagcgcaatcagtacgattctggcgatcagtacaacgatgatgaaatcgatgcgatgcagcaggatgaactggcacgtcagttcgcccagacacagcagcaacgctatggcgaacagtatcaacatgatgtgcccgtaaacgcagaagatgcagatgctgcggcagaggctgaactggctcgtcagtttgcgcaaactcaacaacaacgttattccggcgaacaaccggctggggcgaatccgttcagcctggatgattttgaatttagcccaatgaaagcgttgctggatgatggtccacacgaaccgttgtttacgccaattgttgaacctgtacagcagccgcaacaaccggttgcaccgcagcagcaatatcagcagccgcaacaaccagttccgccgcagccgcagtatcagcagccacaacagccggttgcgccgcagccacaatatcagcagccgcaacaaccggttgcgccacagcagcaatatcagcagccgcaacaaccggttgcgccgcagcagcagtatcagcagccacaacagccagttgcgccacaaccgcaggataccctgcttcatccgctgttgatgcgtaatggcgacagccgtccgttgcataaaccgacgacgccgctgccttctctggatttgctgacaccgccgccgagcgaagtggagccggtagatacctttgcgcttgaacaaatggctcgcctggtggaagcgcgtctggctgatttccgtattaaagccgatgtcgtcaattactctccggggccggttatcactcgctttgaattgaacctggcaccgggcgtaaaagcggcgcgcatttctaacttgagtcgggaccttgcccgtagtcttagcacggtggcggtgcgtgtcgttgaagttattcctggcaaaccctatgtaggtctggagttaccgaataaaaaacgacaaaccgtttatctgcgcgaagttttggataacgccaaattccgcgataatccgagcccattaaccgtggtgctgggtaaagatatcgccggtgagccggtggttgccgatctggcgaaaatgccgcacttgttggttgcggggactaccggttccggtaaatctgtcggtgtgaacgcgatgatcctgagcatgctttataaagcacagccagaagatgtgcgtttcatcatgatcgacccgaaaatgctggagcttagcgtttatgaaggcattccgcatctgttaacggaagtcgttactgatatgaaagatgccgccaacgcgctgcgctggtgtgttaacgagatggagcgtcggtataaactgatgtctgcgctgggtgtgcgtaatctggcgggttataacgaaaaaattgctgaagccgatcgcatgatgcgtccgattccagacccgtactggaagccgggtgacagtatggatgcccagcatccggtgctgaaaaaagaaccatacattgtggtgttggttgacgaatttgccgacctgatgatgacggtaggtaaaaaagtggaagagctgatagcacgtctggcgcaaaaagcccgtgccgcgggtatccacctcgtactggcaactcagcgtccaagcgttgatgttattactggtctgattaaagcgaatattccgacccgtatcgcctttaccgtatccagtaagattgacagtcgtaccattcttgatcaggctggcgcggaaagtctgctgggtatgggggatatgctctactctgggccgaactccacgttgccggtacgtgtccatggtgcttttgttcgcgatcaggaagttcatgccgtggtgcaggactggaaagcgcgtggtcgcccacagtatgttgatggcatcacctccgacagcgaaagcgaaggtggtgcgggtggtttcgatggcgctgaagaactggatccgttgttcgatcaggcggtgcagtttgtcactgaaaaacgcaaagcgagtatttctggcgtacagcgtcagttccgcattggttataaccgtgcagcgcgtattatcgaacagatggaagcgcaggggattgtcagcgaacaggggcacaacggtaatcgtgaagtgctggccccaccgccgtttgactaactaatgcatcgtatgccggataaggcgcggtagcgtcgcatccggcactctatcaactgaaaattcagtattttcttctttcctcaagctgattattagcctggaatagagagtagagggaactcccgatcgggagtgacgtaatttgaggaataatgatgaaaaaaattgccatcacctgtgcattactcagtagcttagtagcaagcagcgtttgggctgatgccgcaagcgatctgaaaagccgcctggataaagtcagcagcttccacgccagcttcacacaaaaagtgactgacggtagcggcgcggcggtgcaggaaggtcagggcgatctgtgggtgaaacgtccaaacttattcaactggcatatgacacaacctgatgaaagcattctggtttctgacggtaaaacactgtggttctataacccgttcgttgagcaagctacggcaacctggctgaaagatgccaccggtaatacgccgtttatgctgattgcccgcaaccagtccagcgactggcagcagtacaatatcaaacagaatggcgatgactttgtcctgacgccgaaagccagcaatggcaatctgaagcagttcaccattaacgtgggacgtgatggcacaatccatcagtttagcgcggtggagcaggacgatcagcgcagcagttatcaactgaaatcccagcaaaatggggctgtggatgcagcgaaatttaccttcaccccgccgcaaggcgtcacggtagatgatcaacgtaagtaaaggcacctgagtgagcaatctgagcctcgattttagcgataatacttttcaacctctggccgcgcgtatgcggccagaaaatttagcacagtatatcggccagcaacatttgctggctgcggggaagccgttgccgcgcgctatcgaagccgggcatttacattctatgatcctctgggggccgccgggtaccggcaaaacaactctcgctgaagtgattgcccgctatgcgaacgctgatgtggaacgtatttctgccgtcacctctggcgtgaaagagattcgcgaggcgatcgagcgcgcccggcaaaaccgcaatgcaggtcgccgcactattctttttgttgacgaagttcaccgtttcaacaaaagccagcaggatgcatttctgccacatattgaagacggcaccatcacttttattggcgcaaccactgaaaacccgagctttgagcttaatagcgcactgctttcccgtgcccgtgtctatctgttgaaatccctgagtacagaggatattgagcaagtactaactcaggcgatggaagacaaaacccgtggctatggtggtcaggatattgttctgccagatgaaacacgacgcgccattgctgaactggtgaatggcgacgcgcgccgggcgttaaatacgctggaaatgatggcggatatggccgaagtcgatgatagcggtaagcgggtcctgaagcctgaattactgaccgaaatcgccggtgaacgtagcgcccgctttgataacaaaggcgatcgcttttacgatctgatttccgcactgcataagagcgtacgtggtagcgcacccgatgcggcgctgtactggtatgcgcgaattattaccgctggtggcgatccgttatatgtcgcgcgtcgctgtctggcgattgcgtctgaagacgtcggtaatgccgatccacgggcgatgcaggtggcaattgcggcctgggattgctttactcgcgttggcccggcggaaggtgaacgcgccattgctcaggcgattgtttacctggcctgcgcgccaaaaagcaacgctgtctacactgcgtttaaagccgcgctggccgatgctcgcgaacgcccggattatgacgtgccggttcatttgcgtaatgcgccgacgaaattaatgaaggaaatgggctacgggcaggaatatcgttacgctcatgatgaagcaaacgcttatgctgccggtgaggtttacttcccgccggaaatagcacaaacacgctattatttcccgacaaacaggggccttgaaggcaagattggcgaaaagctcgcctggctggctgaacaggatcaaaatagccccataaaacgctaccgttaatgttatcgttgcggtaatgttgttactgtatccctgtggtcgcaggctgtggccacatctcccatttaattcgataagcacaggataagcatgctcgatcccaatctgctgcgtaatgagccagacgcagtcgctgaaaaactggcacgccggggctttaagctggatgtagataagctgggcgctcttgaagagcgtcgtaaagtattgcaggtcaaaacggaaaacctgcaagcggagcgtaactcccgaagcaaatccattggccaggcgaaagcgcgcggggaagatatcgagcctttacgtctggaagtgaacaaactgggcgaagagctggatgcagcaaaagccgagctggatgctttacaggctgaaattcgcgatatcgcgctgaccatccctaacctgcctgcagatgaagtgccggtaggtaaagacgaaaatgacaacgttgaagtcagccgctggggtaccccgcgtgagtttgactttgaagttcgtgaccacgtgacgctgggtgaaatgcactctggcctcgactttgcagctgcagttaagctgactggttcccgctttgtggtaatgaaagggcagattgctcgcatgcaccgcgcactgagccagtttatgctggatctgcataccgaacagcatggctacagtgagaactatgttccgtacctggttaaccaggacacgctgtacggtacgggtcaactgccgaaatttgctggcgatctgttccatactcgtccgctggaagaagaagcagacaccagtaactatgcgctgatcccaacggcagaagttccgctgactaacctggtgcgcggtgaaatcatcgatgaagatgatctgccaattaagatgaccgcccacaccccatgcttccgttctgaagccggtagttatggtcgtgacacccgtggtctgatccgtatgcaccagttcgacaaagttgaaatggtgcagatcgtgcgcccagaagacagtatggcggcgctggaagagatgactggtcatgcagaaaaagtcctgcagttgctgggcctgccgtaccgtaaaatcatcctttgcactggcgacatgggctttggcgcttgcaaaacttacgacctggaagtatggatcccggcacagaacacctaccgtgagatctcttcctgctccaacgtttgggatttccaggcacgtcgtatgcaggcacgttgccgcagcaagagcgacaagaaaacccgtctggttcataccctgaacggttctggtctggctgttggtcgtacgctggttgcagtaatggaaaactatcagcaggctgatggtcgtattgaagtaccagaagttctgcgtccgtatatgaacggactggaatatattggctaatacccaatttttctgaatctaaaaagcgcctgcgggcgctttttttgtctccctttgataccgaacaataattactcctcacttacacgtaatactactttcgagtgaaaatctacctatctctttgattttcaaattattcgatgtatacaagcctatatagcgaactgctatagaaataattacacaatacggtttgttactggaatcaatcgtgagcaagcttgagtgagccattatgaaaacgaaaatccctgatgcggtattggctgctgaggtgagtcgccgtggtttggtaaaaacgacagcgatcggcggcctggcaatggccagcagcgcattaacattaccttttagtcggattgcgcacgctgtcgatagcgccattccaacaaaaagtgacgaaaaggttatctggagcgcctgtacagttaactgtggtagtcgctgcccgctacgtatgcacgtcgtggacggtgaaatcaaatatgtcgaaacggacaataccggcgatgacaattacgacggcctgcaccaggttcgcgcctgcctgcgtgggcgttccatgcgtcgccgtgtctacaatccggaccgcctgaaatatccgatgaaacgagtcggggcgcgcggtgaaggcaaattcgagcgcattagctgggaagaagcctacgacatcatcgcgaccaatatgcagcgcctgatcaaagagtacggcaacgagtctatctatctgaactatggcaccggtacgctgggcggcaccatgacccgctcctggccgccgggaaataccctggtcgcgcggctgatgaactgctgcggcggctatctgaaccattacggcgactactcctccgcgcaaattgcggaaggtttgaactatacctacggcggctgggcagatggcaacagcccgagcgatatcgaaaacagtaagctggtagtgctgtttggtaataaccctggcgaaacgcgaatgagtggcggtggggtgacttactatcttgaacaggcacgccagaaatctaatgcccgcatgatcatcatcgatccgcgctataccgacaccggtgccgggcgcgaagatgagtggatccctattcgtccgggaacagatgccgcactggttaacggtctggcgtacgtcatgatcactgaaaacctggtggatcaggcattcctcgataaatattgcgttggctacgatgagaaaaccctgccagccagtgcgccgaaaaatggccactataaagcttatattctgggtgaagggccagatggcgtggctaaaacgccggaatgggccagccaaatcactggtgttccggcagacaaaatcatcaaattggctcgtgaaatcggtagtaccaaaccggcgtttatcagccagggatggggcccgcagcgtcacgctaacggtgaaatcgcaacccgtgctatcagcatgctggcgattctgaccggtaacgttggtattaacggaggcaacagcggcgcgcgtgaaggtagttacagcttaccgtttgtccgtatgccgaccttggaaaacccgatccagaccagcattagcatgtttatgtggaccgatgccattgaacgtggcccggaaatgacggcgctgcgtgatggtgtacgcgggaaagataagctggatgtgccgatcaaaatgatctggaactatgccggtaactgcctgattaaccagcattctgaaatcaaccgtacccatgaaatccttcaggatgataagaagtgcgagctgattgtggttatcgactgccacatgaccagtagcgcgaaatatgctgacatcctgctgcctgactgcaccgcttccgaacagatggactttgcgctggatgcatcctgcgggaatatgtcttacgtgattttcaacgatcaggtgattaaaccgcgctttgaatgtaagaccatctatgaaatgaccagcgaactggcaaaacgtcttggcgttgagcaacagtttactgaaggccgtacccaggaagagtggatgcggcatctgtatgcccagagccgggaagcgattcctgaactgccaacgtttgaagagttccgcaagcaggggatctttaaaaagcgcgacccacaagggcatcacgttgcttataaagccttccgtgaagatccgcaggcaaacccactgactacgccaagcggcaaaattgagatttatagccaggcgctggctgacattgccgctacctgggaattgcctgaaggcgatgtgatcgatccactgccgatctacacgccgggctttgaaagttatcaggatccgctgaacaaacagtatccgctgcagcttacaggtttccactataaatctcgcgttcacagtacttacggcaacgttgatgtgctgaaagcggcttgccgtcaggaaatgtggatcaacccgcttgatgcccaaaaacgcggtatccacaacggcgataaagtcaggatctttaacgatcgtggtgaggttcatattgaggcgaaagtgacgccacgaatgatgccgggtgtggtcgcactgggtgaaggtgcctggtatgacccggatgcaaaacgtgtcgataagggtggttgtattaacgtactgaccactcaacgtccgtctcctctcgctaaggggaatccgagtcatacaaaccttgttcaggttgaaaaggtgtaaggagtaaccgatgacaacccagtatggattttttattgattccagccgttgcaccggttgcaaaacctgcgagctggcctgtaaagactacaaagatttgacgccagaagtcagcttccgccgcatttatgaatatgctggcggcgactggcaggaagataacggtgtctggcaccagaacgtgtttgcctactatctgagcattagttgtaaccactgcgaagatccggcttgtactaaagtctgcccgagcggtgcgatgcataaacgtgaagatggttttgttgtggtcgatgaagatgtgtgcattggctgccgctactgccatatggcttgcccgtatggcgcaccgcaatataacgaaacgaaaggccatatgaccaaatgcgatggttgttatgaccgtgttgcggagggtaaaaagccgatctgtgttgaatcttgtccgctgcgggcgctggatttcggccctatcgacgagctgcgtaaaaaacatggcgatctggcggccgttgcgccgttgccgcgagctcactttaccaaaccgaatattgtgatcaaacccaatgccaatagccgcccgaccggggataccactggctatctggcaaacccgaaggaggtgtgagatgggaagtggatggcatgaatggccgctgatgatcttcacggtcttcgggcaatgtgtagcaggtggttttatcgttctggctttggcgctgctcaaaggcgacctgcgagcagaagcccagcagcgtgttatcgcctgcatgtttggtttatgggtgctgatgggcattggctttatcgcctctatgctccatcttggtagtccaatgcgcgcttttaacagcctcaaccgggtaggggctagtgcactcagtaacgaaatcgccagcggtagcatcttttttgccgtaggcggcatcggctggttgctggcaatgctgaaaaagctgagtccggcattgcgtacgctgtggctgatagtgacgatggttcttggcgtcatctttgtctggatgatggtgcgtgtgtataacagcattgataccgttccgacctggtacagcatctggacgccgatgggcttcttcctgacgatgtttatgggcggcccgttactgggttacctgttgttgagtctggctggcgtcgatggctgggcgatgcgtctgctgccagcaatttctgtactggcactggtagtgagtggcgtggtgagtgtgatgcagggcgcagagctggcgactattcatagttctgtgcagcaggccgcagcgctggtgccggactatggtgcgctgatgtcctggcggatcgtgcttttggccgttgccctgtgcttgtggattgcaccacagctaaaaggttatcagcctgcggttccgctactttctgtaagtttcattctgcttctggcaggggaattaatcggtcgcggcgtattctatggtttgcatatgaccgtggggatggccgtcgcaagctaatcataacaaccggggtttcggccccggttctcttttatttctgcttcgttaacgtgtcataactggtcatcaaattacgataatcaggaatgtggttagagaacaacgtcgccagtccttcaatatcattacgccagtcgcgatgcagctcgcacgccacgccgaaccatgtcatcaattgcgcaccagcttggctcaagcgatcccatgcgctatgccgggtaatttcattaaaggtcccactcgcgtcagtcacgacaaagacgtcaaacccttcttcaatggcactaagcgccgggaatgccacgcaaacttcggttaccacaccggcaataattaactgttttttacctgtcgctttgacagcttttacaaaatcttcgttatcccaggcgttaatatttcccgggcgagcaatgtaaggtgtatcggggaattgtgctttcagttctggaactaatgggccgttaggaccggtttcaaaactggtggtaagaatagttggtaagttgaaatacttagccaggtcacccagcgccagcacgttatttttaaacttatcgggttcgatatcccgtacaagggaaagtaaaccagcctggtgatcaacaagcaaaacggcagcatcatttttatcaagacgaacatacggtttggtcatcctcttctcctttcgagagtcagtggtacgtctgaaatcgatcagacgcgatgcattgctctgaaagcatagacgggaaatatgagtttgctgtgaccatgaaatttttcgactgaacgaagcgtatgaaatttgtgttagttcaataaaaacaatcagatgagactaatcatctcttcagcattagcgttatgaatgagtaatataaatcgataataccgccgctgggatatcgcgtattttcacccattgacaatgtttttggcggtggcatgatgcgcatgaaatttgaacttcctcacggttttaattcatgtccacgtatacccagcctgtcatgcttttgctgtctggcctgcttttgttgactctggcgattgcggtgttaaatacactcgtgccgctttggctcgcccaggaacacatgtccacatggcaggtaggcgttgtcagcagttcctattttaccggcaaccttgtcggtacattgctgacagggtatgtcattaagcgcattggctttaaccgcagctattatctggcctccttcatttttgccgctggctgtgccggccttggcctgatgattggattctggagctggttggcttggcgttttgtcgcgggcgtcggctgtgccatgatttgggtggttgttgagagcgcgctgatgtgcagtgggacgagtcgtaaccgtgggcgtttgcttgctgcgtatatgatggtttattacgtgggaacgtttttaggccagttactggtcagcaaagttagtaccgagctgatgtccgtattgccgtgggttacaggtttgacgttggcagggatcttaccgctgttgtttacgcgtgtgctgaatcagcaggctgaaaaccatgatagcacgagtattacgagtatgctaaaactccgtcaggcgcggcttggcgtgaatggctgcattatcagtggaatcgttctgggatctctatatggcctgatgccgctgtacctcaatcacaaaggggtgagcaatgccagcattggtttctggatggcggtactggtcagtgcgggtatccttggacaatggccgattggacgtctggcggataagtttggtcgactgctggtgttgcgtgttcaggtctttgtcgtcattctcggcagtatcgcgatgcttagccaggcggcgatggccccagcgttattcatcctcggtgccgctggctttacgctatatccggtggcgatggcatgggcttgcgagaaagttgaacatcatcaactggtggcgatgaaccaggccttactgttgagctatactgtgggaagtctgcttggcccgagttttaccgctatgctaatgcagaatttctccgataatttattgtttatcatgatcgccagcgtaagctttatctatttgctgatgctgctgcgcaacgccggtcatacgccgaaacccgttgctcacgtgtaaatgaattcaagcagagtgtgaacttactgtttcacactctgcttttttgtttcttctatctgacttgctttattccaaattttattcgtttaaaaataaaatgtgcagcaggttataattttgcatttcgctatttccgcacttcttatttgccgcgcataatccctcgttttaccgatgcccctttaattttggcgaaggatttgtctatggctgggaatgttcaggaaaaacagttgcgatggtacaacattgcgctgatgtcttttatcactgtctggggttttggcaacgttgttaataactatgccaaccaggggctggtggttgtttttagttgggtgtttatctttgcactctatttcacaccttatgcgctaattgttggtcagttaggcagcaccttcaaagatgggaagggcggggtcagtacctggattaaacacacgatgggacccggactggcttatctcgccgcgtggacctactgggtggtgcatattccctatctggcacaaaaaccccaggcaattctgattgcgctcggttgggcgatgaaaggcgacggtagcctaatcaaagaatatagtgtcgtagcgttacaggggttaacgctggtgctgtttatcttctttatgtgggttgctagtcgcggtatgaaaagcctgaaaatcgtcggttctgtggcagggattgctatgtttgttatgagtctcctgtatgtggcgatggcggtaaccgcgcctgcaattactgaagtgcatattgcgaccacaaacattacctgggaaacgttcattcctcatatcgactttacctacattaccactattagtatgctggttttcgcggttggcggagcagagaagatttctccttacgttaatcaaacgcgcaacccaggaaaagaatttccaaaagggatgttatgcctggcggtgatggttgcggtttgtgccattctgggcagcctggcgatggggatgatgtttgatagccgtaatatcccggatgacttaatgaccaacggtcagtattacgcctttcagaagctgggcgagtattacaacatgggtaatactttaatggtgatttacgccattgcgaataccctgggacaagtagcggcgctggtattcagcattgatgccccgcttaaagtgctattaggtgatgctgacagcaaatatattccagccagtttatgtcgtaccaacgcttctggtacgcccgttaatggctattttctgaccctggtactggtggcgattctgattatgctgccgactctcggcattggtgatatgaacaatctctataaatggctgttgaaccttaatagcgtagtgatgccgctgcgttatttatgggtatttgttgcatttattgcagtcgttcgcttggcgcagaaatataaaccagaatatgtctttattcgtaataagcctctggcaatgaccgtcgggatttggtgttttgcctttaccgcctttgcctgtttgacggggatcttcccgaaaatggaagccttcactgcagagtggaccttccagttggcgctgaatgttgcaacgccgtttgtgctggtaggattaggactgatattcccgctgctggcgcgtaaagcgaatagtaaataattattgtggtcggtgacgctgactctggcagatctgacccgtttttacataatcgagaaatgcgcgcaagccgcaggacatatactggcggtttggataatagatctggaagcctggacgctctgtgctccagtcttccagtacacattctaaacgaccagtatcaaggtactccttgatctgttcatagagcagatacccgataccagcacccatcaaaacggcctccagttcagcatcaacatcatccagaatgatatttcctgcgacagcaatttccagctcctttgcaaattgccagtggaaaggtttgccgctgggataacgaaaaacaacacattgatgattaagcagatcatgaggatggcggggtttgccatatcttgcaaagtactctggcgttgctgctacacataatttcactggcgggccgatcgccacgctgatcatatctttttcgacgatgcaactaagtcgaacgccagcgtcaaagccctgttggacgatatcgacaagagagtcgtcagttgtgagctcgactttaatatcaggatattcacgtgtgaaaccaaccagtaaagacattaaaaatatacgtgcagctacccgggcggcattgattttgagcgttcctgtcggtgtcagacgaaaatcattcatctcatctaacatgatctgaatttcgtcgaaagctgggcgcaatcgttcatagagattagaacccgcttccgttaagcttacgcttcgggttgtccgattgaataagcgaattttaagacgttgttccagtgttttaatactatggctaatggcggagctggataagcctaactcatcgcccgctgcacgaaagctttgattacgggccacggcaaagaaagtggcaaagtcagacatattcatccgcattagtgaaaatccttcattaactcatcctgaatcatcacgtttacaggattatgccgcctgcgtaaagtgcgctccagaacttaacgtggaggtaaaattatgcagtctgaacgtatttatttggtatgggcccatcctcgtcatgatagtttgaccgcacatattgctgatgcgatccatcagcgggcaatggagcggaaaatacaggtgacggaactcgatttatatcggcgtaatttcaacccagtgatgacgccggaagatgaaccagactggaagaatatggataaacgttattctccagaggttcatcagctttatagtgagctgcttgaacatgacacgttagtggtggtttttcctctctggtggtacagcttcccggcaatgctaaaaggatatattgacagagtatggaataatgggctggcttatggagatgggcacaaattaccattcaataaagttcgttgggtggcgctggttggaggagacaaagaaagttttgtccagatgggctgggaaaaaaatataagcgattatttaaaaaatatgtgcagttatcttggtattgaagatgccgatgtcactttcttgtgtaatacagtggtattcgatggggaagaacttcacgcgagctattatcagagcttattatctcaggtacgggatatggtagatgcactataagatgtgttaaaaacgctgtagcagaatgaagcgcggaataaaaaagcggcaactcaataaagttgccgctttacggggaaattagaacattaccttatgaccgtactgctcaagaatgcctttcacgcgttccatggtctctttcttcggtggtttaacaccgtcgagtttgtactcttcacccattgccacccatttgtgtttgcccagctcgtggtaggggagaagctcgattttctcaacgttgcccatatcacgggtaaattcaccgaggcgatgcgcactatcgtcatcgtcagaccagcctgggacaacaacgtagcggatccacaccttcacatttttgttcgccagatatttagcgaactccagcgtgcggtggttggaaactccaaccagattttggtggatctcgtcgttcatctgtttgagatcgagcattaccaggtcggttacttccagcagttcatcaatcaccggatcgtaacgacgaacaaaaccgttggtgtccagacaggtatgaatgccttcttttttgcaggcgcggaaccagtcacgaacaaactcagcttgcaggattgcttcaccgccggatgcggtaacgccgccgccggaagcgttcataaagtggcgataggtcaccacttccttcatcaaatcttcaacggtaacttctttaccgccatgcgtgtcccaggtgtcgcggttatgacaatacaggcagcgcatcaggcagccctggaaaaaggtgataaagcgaatacctgggccgtctacggttccacaggattcaaaggagtgaatgcgaccaataacactcattgcggtgtttctccagatgtggcccatctgaggccgtgttggtgcgcagctcgaaggctacgtcgagtctgttttggcagtcaccttaaagtatagatagctgacaaaaaaggctctcgcgctaaaaaaggccccactttcgtggagcctttattgtacgctttttactgtacgatttcagtcaaatctaattacatagattgagtgaaggtacgagtaataacgtcctgctgctgttctttagtcaggctgttgaaacgtactgcgtagccagatacacggatggtcagctgcggatatttttccgggttttccatcgcgtcgagcagcatttcacggttcatcacgttaacgttcaggtgctgaccaccttcgatggatgcttcgtggtggaagtaaccatccatcagaccagccaggttggtcttacgaacttcgtcgtctttacccagtgcgttcggaacgatagagaaggtgtaggagataccatctttagcgtaagcaaacggcagtttagcaacggaagtcagagaggctactgcacctttctggtcacgaccgtgcatcgggttagcacccggtccgaacggcgcgccagcacgacgaccgtctggggtgttacccgttttcttaccatacacaacgttagaagtgatggtcagaacagactgagtcgggatagcgtcacggtaggtgtgcagtttctgaattttcttcatgaaacgttctaccaggtcaacagccaggtcatctacacgcggatcattgttaccaaactgcgggtattcgccttcgatttcgaagtcgatagccagaccgtcttcgtcacgaatcggtttaactttcgcatatttgattgcagacagggagtcagcagcaacggacagaccagcgataccacacgccatggtgcggataacgtcacggtcgtgcagcgccatcagagaggcttcgtagctgtacttgtcgtgcatgtagtggatgatgttcagtgcagtgatgtactgtttagccagccagtccatgaagtgatccatgcgctccatcacttcatcatagttcaggacatcgcctttgatcggttcagacttcggaccaacctgcattttcagtttttcgtcaacgccgccgttgattgcgtacagcatggttttcgccaggtttgcacgcgcaccgaagaactgcatttgtttaccaacgatcatcgggcttacgcagcaagcaatagcgtagtcatcgttgttgaagtccggacgcatcaggtcatcgttctcatactgcagagaagaggtgtcgatggacactttagcggcgaatttcttgaagttcagcggcagtttttcagaccacagaatggtcatgttcggttccggagacggacccatggtgtacagggtgttcaggaaacggaagctgtttttggtaaccagggtacgaccgtcgaggcccataccaccgatagattcggttgcccagatcgggtcgccagagaacagttcatcgtattccggagtacgcaggaagcgaaccatacgcagtttcatgaccaggtggtcaaccatttcctgcgcttcttgttcggtgatcttgccagctttcaggtcacgttcgatgtacacatccaggaaggtggaggtacgaccgaaggacattgcagcaccgttctgagacttaacagcagccaggtagccgaagtaagtccactggatagcttcctgagcgttggtagccggaccagagatgtcgtagccgtatttcgcagccatttctttcatctgacccagagcgcggtgctgttcagcgatttcttcgcgcagacggatagtctgttccaggtttacgccgttttccagatcagcctgcagagaagtgaactgtgccagtttgtctttcatcaggtagtcgataccgtacagcgcaacgcgacggtagtcaccgatgatacggccacggccatatgcatctggcagaccggtcagaacaccagatttacggcaacgcaggatgtccggagtgtaaacgtcgaacacgccctggttgtgagttttacggtattcagtgaagatttttttgatcatcggatccagttcgcggttgtacgctttgcaggaaccttcgatcattttgataccaccgaacgggataagagcacgtttcagcggagcttcagtctgcagaccaacgattttctcaagctgcttgttgatgtagccagcgtcgtgagaggtgatggtggaagcaacagcggtgtcaaagtcaactggcgcgtgagtgcggttttccagtttaacgccttccattactttgtcccacagggtggtggtcgcttcagtagcgccagccaggaaggactcgtcaccctcgtacggagtgtagtttttctgaatgaagtcacggacgtttacttcattctgccagtcacctttggtaaaaccttcccaggctgtggctaacttttcattaagctcggacatgtaacacctaccttcttaagtggattttttatttactgcgtacttcgacaaccattaatggtggtcgttttcacgcaggtaaatgacccagtatgtcaacccaaccaacaaaccaccaccgataatgttgccgatcgtaaccggaatcaggttatcagtgatgaaattcatcacggtcaggtgagaaaaattttccggtgcagaaccgactgcggtccaaaattccggggatgcgaagtcgcggattacaatacccatcgggatcataaacatgtttgcgatactgtgctcaaaaccgctggcaacaaacatcgcgaccggcagcaccataatgaacgctttgtccatcaggctgcggccagaataactcatccatactgccagacataccatcaggtttgccaggataccaagacagacggcctcaataaaagtatggtgcactttgtggtcggcggtttgtaggacgtttagtccccattgaccatttgcggtcatatactcgccggaaagccacattaaaagtacaaacagcagtgcgccgaccaggttgccaaaatagacatttagccagtttttcgccaactgaccccaggtgatgcgcccactcgccttagcaacaacaatcaacacggtggaagtaaagagatcggctccgcagacaacacaaagaatcagccccagagagaagcaaatgccgccaaccagttttgccatgccgaagggcattgtgcctgtgccagtggttgctgtgatatagaagacgaatgcgatactgatgaaaacaccggcggtaatcgccagatagaaagtcttaagcggatgtttcgttgctttatagacacccgcctcttcggccactttggccattgcagcaggaagtaaaagatcaaaagggttgtcagctttcacactaactctctctttattaagtcggcgacgagatactaacaaagcattatagatgagaaattgatatagatcatatctcgcctggcttataggcccgtaactcgcatggtttttatgcaaatacggagtaaatatttgattatccaaataaaaataaattttaaaaattaacaaatgagttgaattttttccgcatcctccgctaaaacagttaattaaaagggagcatcaggcgaataaagtaacaatatcgatcgtatttattaaatacaaattaccgatatttaaccttataattacaattattttattaatgcaaatatatgtaaagcggggcattaaaaaaacgccccgtaatataactcagactaatcattaagcctacattgcgtaggctatttgattttattttgcccagaatgctgctttggcgcgctgcagcttttcgtaggccttcaacaagctctgatgtgcagcaaacgcgtgcagatcgctatctaccggttgcaggccgtaaaacgccgcttcgccgctcattgccgcactggcggcttctacggcatctgcgccgtacatgcgaacaaacgcattcagatattgcagcggctggcgatcttcttcctgtgccagtaataacaacgtttgcaggcagcgataatagttggcgcgttccggactaaatacactactgttaaactccatcgtccattcggtccagaccagagcctgttccagatcgccaccagccagcgccagcatggcttttaattcaccgatacgcagggtgtaccaaccgttatcgctcccggtcgccagacccaacagctcacgcacgcgggtaaagtcatcaaaaccttcttcatccagttgctcgatgaggttcaggtaatcttctttttcccactcgctgcctggtaggctaagaatcgtttcacgtaaatggctgcccatactgttattcgcgagccacagatcttcagccggataaatatcggacatgccaggcacgataatacggcaagcataaacgcccagatgctcgtaatcggcaatataaacttctttatcttctttgttgaagatagccatcagtgtggcgaactcttcttccgtggtgccggagaaattccagtccacaaacggataatcggcatcctgcttgaacaggtcccaggagattaaaccgctggaatcgataaagtgcgtttcgaggttggtatgttcagcgacttcttcatcatcgaaggttggcggagtaaacacatccaaatctttcaggccacgaccttgcagcagctcggtcacggtacgttccagtgctacgccaaaatcaggatgcgcaccgaaagaggcaaagcaggtaccgttagcaggattgaacagtaccacgcaaatcaccggatactggccgccaaggctaccgtcataagcgaagattgggaaaccctccgcttccagcgtttcgatggcttcaactactgctgggtaacgcgccagcacgtctgccgggatctctggcaggctgatgctttcagcaataatgcggtttttcacgtagcgttcgaaaacttcagacaatccctgaacgcgtgcttcgttgcgggtattacctgcggacataccgttggagacgtacaggttaccaatgatattcatcggaatataaacggtctgattgtcggactgacgcgtaaacggcaggccgcaaataccacgatcttcgttaccggattgtaggtcaatcagcatgctgccggtcagttcattctccggatcataaaacgcgcgcagacggtcatcgagcagcccttctggcacatcgtcattttcggtcagtgggaaccatttttcgttgggataatgcacgaacggaccgttggcgatggtttcgcccagccagaagtccgcaaaaaagtagttggtactgagacgctcgaaatattcaccgagtgcagaagccagcgccgctttcttggttgcgcctttaccgttggtaaaacacagtgcgcactctttgtcgcgaatatgtacagaccagacgttaggcacgggattcagccaggaggcctcttcaatctgaaagccgaggtcactaagtttttgctggaagcgagcgatggaatcttccagagcggcatctttgccggggataaatgtttgcgtcatgaaaatcactttagtcgtacggaaagcgcgcaataatacgggttttatctcaaaggcgctatcaccgccgccatgccgatgaactgttgactatgcttttagcggataaaccacgttaagagcataaaaatgaaggcgttcgatctccaccgtatggcatttgataaagtgccttttgatttccttggcgaagttgcactacgtagtctttatacctttgtactggtctttttgttcctcaaaatgaccggaagacgcggtgtgcggcagatgagcctgtttgaagttttaatcattctgacgctgggaagtgcggcgggagatgtggcgttttatgatgatgtgccgatggtcccggtacttatcgtctttattactctggcgttgttataccgcctggtaatgtggttgatggcgcacagtgaaaaactggaagatcttctggaaggcaagccagttgtcattattgaagatggcgagctggcctggagcaaactcaataactccaacatgacggaatttgagttctttatggagctacgattgcgtggcgtggagcagctggggcaggtacgtctggcgattctcgaaaccaacgggcaaatcagtgtctatttctttgaagatgacaaggtgaaaccgggtttacttattttacccagtgattgtacgcagcgttacaaagtggtgccggagagcgcggactatgcctgtattcgttgtagtgaaatcattcatatgaaagcgggggaaaaacaattatgtccgcgctgtgcaaatccagaatggacgaaggcaagtcgggcaaaacgggtgacctgacagtaaaaacatcggctttttgctaataatccgagagattcttttgtgtgatgcaagccacatttttgccctcaacggttttactcattgcgatgtgtgtcactgaatgataaaaccgatagccacaggaataatgtattacctgtggtcgcaatcgattgaccgcgggttaatagcaacgcaacgtggtgaggggaaatggctcaaatcttcaattttagttctggtccggcaatgctaccggcagaggtgcttaaacaggctcaacaggaactgcgcgactggaacggtcttggtacgagcgtgatggaagtgagtcaccgtggcaaagagttcattcaggttgcagaggaagccgagaaggattttcgcgatcttcttaatgtcccctccaactacaaggtattattctgccatggcggtggtcgcggtcagtttgctgcggtaccgctgaatattctcggtgataaaaccaccgcagattatgttgatgccggttactgggcggcaagtgccattaaagaagcgaaaaaatactgcacgcctaatgtctttgacgccaaagtgactgttgatggtctgcgcgcggttaagccaatgcgtgaatggcaactctctgataatgctgcttatatgcattattgcccgaatgaaaccatcgatggtatcgccatcgacgaaacgccagacttcggcgcagatgtggtggtcgccgctgacttctctagtaccattctttcccgtccgattgacgtcagccgttatggtgtaatttacgctggcgcgcagaaaaatatcggcccggctggcctgacaatcgtcatcgttcgtgaagatttgctgggcaaagcgaatatcgcgtgtccgagcattctggattattccatcctcaacgataacggctccatgtttaacacgccgccgacatttgcctggtatctatctggtctggtctttaaatggctgaaagcgaacggcggtgtagctgaaatggataaaatcaatcagcaaaaagcagaactgctatatggggtgattgataacagcgatttctaccgcaatgacgtggcgaaagctaaccgtagccggatgaacgtgccgttccagttggcggacagtgcgcttgacaaattgttccttgaagagtcttttgctgctggccttcatgcactgaaaggtcaccgtgtggtcggcggaatgcgcgcttctatttataacgccatgccgctggaaggcgttaaagcgctgacagacttcatggttgagttcgaacgccgtcacggttaatgccgaaattttgcttaatccccacagccagcctgtggggtttttatttctgttgtagagagttgagttcatggaatccctgacgttacaacccatcgctcgtgtcgatggcactattaatctgcccggttccaagagcgtttctaaccgcgctttattgctggcggcattagcacacggcaaaacagtattaaccaatctgctggatagcgatgacgtgcgccatatgctgaatgcattaacagcgttaggggtaagctatacgcttagtgccgatcgtacgcgttgcgaaattatcggtaacggcggtccattacacgcagaaggtgccctggagttgttcctcggtaacgccggaacggcaatgcgtccgctggcggcagctctttgtctgggtagcaatgatattgtgctgaccggtgagccgcgtatgaaagaacgcccgattggtcatctggtggatgcgctgcgcctgggcggggcgaagatcacttacctggaacaagaaaattatccgccgttgcgtttacagggcggctttactggcggcaacgttgacgttgatggctccgtttccagccaattcctcaccgcactgttaatgactgcgcctcttgcgccggaagatacggtgattcgtattaaaggcgatctggtttctaaaccttatatcgacatcacactcaatctgatgaagacgtttggtgttgaaattgaaaatcagcactatcaacaatttgtcgtaaaaggcgggcagtcttatcagtctccgggtacttatttggtcgaaggcgatgcatctagcgcttcttactttctggcagcagcagcaatcaaaggcggcactgtaaaagtgaccggtattggacgtaacagtatgcagggtgatattcgctttgctgatgtgctggaaaaaatgggcgcgaccatttgctggggcgatgattatatttcctgcacgcgtggtgaactgaacgctattgatatggatatgaaccatattcctgatgcggcgatgaccattgccacggcggcgttatttgcaaaaggcaccaccacgctgcgcaatatctataactggcgtgttaaagagaccgatcgcctgtttgcgatggcaacagaactgcgtaaagtcggcgcggaagtggaagaggggcacgattacattcgtatcactcctccggaaaaactgaactttgccgagatcgcgacatacaatgatcaccggatggcgatgtgtttcagcctggtggcgttgagtgatacaccagtgacgattcttgatcccaaatgcacggccaaaacatttccggattatttcgagcagctggcgcggattagccaggcagcctgaatgaacaacgggcaataaatagccaaatctttctttatcaaaacgtcggcacattgtcggcgttttttttcggaccttgtgagtcattttgattaatggtagcgtcgcttgtcaatgtaagttgttgatacataatatttatatatgattaatcaacggatgattcacatgaagaatactaaattactgctggcgattgcgacctctgcagcattactgacagggtgtcaaaatacccacggtattgataccaatatggctatcagctccggtttaaatgcctataaagcagcaacattaagcgatgccgatgcaaaagcgattgccaatcagggctgtgccgaaatggacagcggcaatcaagtcgcaagtaaatccagcaagtacggtaaacgtctggcaaaaatcgccaaagcattgggtaacaatattaatggcacgccggtcaactataaggtttatatgaccagcgacgtcaacgcatgggcgatggcgaacggctgtgttcgtgtctacagtggcctgatggacatgatgaatgacaacgaaattgaaggcgttctgggccatgaactgggccacgtcgcgttgggtcacagcctggctgaaatgaaagcttcttatgcgatcgttgccgcacgcgatgccattagtgctaccagcggtgtggcttcccagctttcccgcagtcaattaggtgatatcgcagaaggcgctatcaatgctaaatactcccgtgataaagagtccgaagcagatgatttctcctttgatctgttgaagaaacgtggcatcagcacccaggggctggttggcagctttgaaacactggctagcctggatggcggtcgcacccagtccatgtttgactctcacccaccaagtacagagcgtgcgcaacacatccgtgatcgtatcgcctctggtaagtaaatcattgtcatctttcgggctggtcttctgccagcccgctataattgcgcaataaatccccatctgaatacagacaaaactggtttttgcacacaacgttaacgatttgtggcgtcggcgcgtataatgcgcgcggttatgttaacggtacgcctgttttaaggagataaagatgacggcaattgccccggttattaccattgatggcccaagcggtgcagggaaaggcaccttgtgtaaggctatggcggaagcgttgcaatggcatctgctggacagcggtgcaatttatcgcgtactggcattggcggcattacatcaccatgttgatgttgcgagcgaagatgcgctggtaccgctggcatcccatctggatgtacgttttgtgagcaccaatggcaatctggaagtgatcctcgaaggggaagatgtcagcggcgaaattcgtactcaggaagtggcgaatgcagctagtcaagtcgcggcattcccacgcgttcgtgaagcattattgcgtcgccaacgcgcgtttcgcgaattaccaggtctgattgccgatggccgcgacatgggaacggtggtattccctgatgcaccagtgaaaattttccttgacgcctccagcgaagaacgtgcgcatcgccgcatgctacagttgcaggagaagggctttagtgttaactttgagcgccttttggccgagatcaaagaacgcgacgaccgcgatcgtaaccgagcggtagcgccactggttccggcagccgatgctttagtgttggattccaccaccttaagcattgagcaagtgattgaaaaagcgctacaatacgcgcgccagaaattggctctcgcataagcgaccgaatttgcagtacccccgttgcaatggaatgacagcgggtatgttaaacaaccccatccggcatggagccaggtggacgttaaatataaacctgaagattaaacatgactgaatcttttgctcaactctttgaagagtccttaaaagaaatcgaaacccgcccgggttctatcgttcgtggcgttgttgttgctatcgacaaagacgtagtactggttgacgctggtctgaaatctgagtccgccatcccggctgagcagttcaaaaacgcccagggcgagctggaaatccaggtaggtgacgaagttgacgttgctctggacgcagtagaagacggcttcggtgaaactctgctgtcccgtgagaaagctaaacgtcacgaagcctggatcacgctggaaaaagcttacgaagatgctgaaactgttaccggtgttatcaacggcaaagttaagggcggcttcactgttgagctgaacggtattcgtgcgttcctgccaggttctctggtagacgttcgtccggtgcgtgacactctgcacctggaaggcaaagagcttgaatttaaagtaatcaagctggatcagaagcgcaacaacgttgttgtttctcgtcgtgccgttatcgaatccgaaaacagcgcagagcgcgatcagctgctggaaaacctgcaggaaggcatggaagttaaaggtatcgttaagaacctcactgactacggtgcattcgttgatctgggcggcgttgacggcctgctgcacatcactgacatggcctggaaacgcgttaagcatccgagcgaaatcgtcaacgtgggcgacgaaatcactgttaaagtgctgaagttcgaccgcgaacgtacccgtgtatccctgggcctgaaacagctgggcgaagatccgtgggtagctatcgctaaacgttatccggaaggtaccaaactgactggtcgcgtgaccaacctgaccgactacggctgcttcgttgaaatcgaagaaggcgttgaaggcctggtacacgtttccgaaatggactggaccaacaaaaacatccacccgtccaaagttgttaacgttggcgatgtagtggaagttatggttctggatatcgacgaagaacgtcgtcgtatctccctgggtctgaaacagtgcaaagctaacccgtggcagcagttcgcggaaacccacaacaagggcgaccgtgttgaaggtaaaatcaagtctatcactgacttcggtatcttcatcggcttggacggcggcatcgacggcctggttcacctgtctgacatctcctggaacgttgcaggcgaagaagcagttcgtgaatacaaaaaaggcgacgaaatcgctgcagttgttctgcaggttgacgcagaacgtgaacgtatctccctgggcgttaaacagctcgcagaagatccgttcaacaactgggttgctctgaacaagaaaggcgctatcgtaaccggtaaagtaactgcagttgacgctaaaggcgcaaccgtagaactggctgacggcgttgaaggttacctgcgtgcttctgaagcatcccgtgaccgcgttgaagacgctaccctggttctgagcgttggcgacgaagttgaagctaaattcaccggcgttgatcgtaaaaaccgcgcaatcagcctgtctgttcgtgcgaaagacgaagctgacgagaaagatgcaatcgcaactgttaacaaacaggaagatgcaaacttctccaacaacgcaatggctgaagctttcaaagcagctaaaggcgagtaattctctgactcttcgggatttttattccgaagtttgttgagtttacttgacagattgcaggtttcgtcctgtaatcaagcactaagggcggctacggccgcccttaatcaatgcagcaacagcagccgcttaatttgcctttaaggaaccggaggaatcatgaccaagagtgaattgatagaaagacttgccacccagcaaagccacattcccgccaagacggttgaagatgcagtaaaagagatgctggagcatatggccagcactcttgcgcagggcgagcgtattgaaatccgcggtttcggcagtttctctttgcactaccgcgcaccacgtaccggacgtaatccgaagactggcgataaagtagaactggaaggaaaatacgttcctcactttaaacttggtaaagaactgcgcgatcgcgccaatatttacggttaagttttttactcaaacttgaacgagagaaaagcacctgtcgggtgcttttttcatttctctaatctggaactggaagctgcctcgcagagttttgaacagttttcaccctttcgttaaattcttctgaatatgcctcggggaacgcaaaattcccaccagacaaccgctcaacaaagttgcacactttccataaacagggaggggtgcatgaaaataacgacagtcggtgtatgcataattagcggaatttttccgttgctgattttgccccaattgcctgggacattaacccttgcgtttctgactctcttcgcctgcgtactggcatttatccctgttaaaaccgtccgttatatcgcgctgacgttgctgtttttcgtttggggcatattaagtgcaaagcaaattttgtgggcaggagaaaccttaactggcgcgacgcaggatgcaattgttgagatcactgcaactgacggcatgaccactcattacggtcaaattactcatctacaaggtcgacgtatattccctgcgagtggtctcgtgatgtatggcgaatatcttccgcaagcggtttgtgctggacaacaatggagtatgaaactcaaagttcgtgcagttcatggccaacttaatgatggcggctttgatagccagcgttatgccattgcccagcatcagccgctcaccggccgttttctgcaggcaagtgtcattgaaccgaattgtagcctgcgtgcacagtatctggcgagtctacaaacaacgctgcaaccctatccgtggaatgcggttattcttggtttaggtatgggggaacggttatccgtccccaaagaaatcaaaaatatcatgcgcgatactggaacggcgcatttaatggcgataagcggattgcacatcgcttttgcggcgttgctggctgccggactcattcgcagtggacaaatttttctgcctgggcgctggatccactggcaaataccattaattggcggaatctgctgtgctgctttttatgcctggttgacgggaatgcaacctcctgcattgcgtaccatggtggcgcttgctacgtggggaatgcttaagttaagtgggcgacagtggagtggctgggatgtatggatatgttgtctggcggcaattttgctgatggatcctgttgccattctcagccaaagtttatggctctctgccgctgcggtcgcggcattgatattttggtatcagtggtttccctgtcctgagtggcaactgccgccggtattgcgtgcagttgtttccctcatccatctgcaactgggaatcacacttctgcttatgcccgtgcaaatcgtcatatttcatggcattagtctgaccagctttattgcaaatctattagcaattcccttggtgacatttatcacggttccgttgatcctcgccgcgatggttgtgcatttaagcgggccgttaatcctggagcaagggttatggtttcttgccgaccggtctttggctttacttttctgggggttaaagagtttgccggaagggtggatcaacattgctgaatgttggcaatggctaagtttttccccatggttcttactggtggtatggcgattaaacgcctggcgaacgttgccagcaatgtgtgtggctggaggcttgctgatgtgctggccgctgtggcaaaaacctcgacctgacgagtggcagctgtacatgcttgatgtcgggcaagggctggcaatggtgatagccagaaacggcaaagcgattctctatgacacaggactggcctggcctgaaggggatagtgggcaacaactgattatcccctggctccactggcataatcttgaaccggaaggcgttattctgagccatgaacatctggatcaccggggagggctggatagtatattgcatatatggccgatgttatggatcagaagtccgttaaactgggaacatcatcagccctgtgtgcgtggcgaagcgtggcaatggcaaggattgcgtttcagcgcgcactggcctttacaaggtagcaacgataaaggaaataaccattcctgtgtggttaaggttgatgacgggacgaatagcattcttctaaccggtgatattgaagccccagctgaacaaaagatgctaagccgttactggcagcaagtgcaggcaacattgcttcaggtacctcaccatggcagtaataccagtagtagcttgccattaattcagcgagtgaatggaaaagtggcactcgcaagcgcaagccgctataacgcatggcgactgccctctaacaaagttaagcatcgctatcaactgcaaggatatcaatggattgatactccacatcaaggtcaaacaacggtcaattttagtgcgcaaggctggcggattagcagcctcagggagcaaattttacctcgttggtatcatcagtggtttggcgtgccagtggataacgggtaaaatatgcggctatttcaacaaatgctggttttttgaatgcataacgacaaagatctctctacgtggcagacattccgccgactgtggccaaccattgcgcctttcaaagcgggtctgatcgtggcgggcgtagcgttaatcctcaacgcagccagcgataccttcatgttaagcctccttaagccacttcttgatgatggctttggtaaaacagatcgctccgtgctggtgtggatgccgctggtggtgatcgggctgatgattttacgtggtatcaccagctatgtctccagctactgtatctcctgggtaagtggaaaggtggtaatgaccatgcgtcgccgcctgtttggtcacatgatgggaatgccagttagtttctttgacaaacagagtacgggtacgctgttgagtcgtattacctacgattccgaacaggttgcttcttcttcttccggcgcactgattactgttgtgcgtgaaggtgcgagcatcatcggcctgttcatcatgatgttctattacagttggcaactgagcatcattttgattgtgctggcaccgattgttagcattgcgattcgcgttgtaagcaagcgttttcgcaacatcagtaaaaacatgcagaacaccatggggcaggtgaccaccagcgcagaacaaatgctgaagggccacaaagaagtattgattttcggtggtcaggaagtggaaacgaaacgctttgataaagtcagcaaccgaatgcgtcttcaggggatgaaaatggttagtgcctcttccatctctgatccgatcattcagctgatcgcctctttggcgctggcgtttgttctgtatgcggcgagcttcccaagtgtcatggatagcctgactgccggtacgattaccgttgttttctctagtatgattgcactgatgcgtccgctgaaaagcctgaccaacgttaacgcccagttccagcgcggtatggcggcttgtcagacgctgtttaccattctggacagtgagcaggagaaagatgaaggtaagcgcgtgatcgagcgtgcgactggcgacgtggaattccgcaatgtcacctttacttatccgggacgtgacgtacctgcattgcgtaacatcaacctgaaaattccggcagggaagacggttgctctggttggacgctctggtagcggtaaaagtaccatcgccagcctgatcacgcgtttttacgatattgatgaaggcgaaatcctgatggatggtcacgatctgcgcgagtataccctggcgagcttacgtaaccaggttgctctggtgagccagaatgtccatctgtttaacgatacggttgctaacaacattgcttacgcacggactgaacagtacagccgtgagcaaattgaagaagcggcgcgtatggcctacgccatggacttcatcaataagatggataacggtctcgatacagtgattggtgaaaacggcgtgctgctctctggcggtcagcgtcagcgtattgctatcgctcgagccttgttgcgtgatagcccgattctgattctggacgaagctaccagcgctctggataccgaatccgaacgtgcgattcaggcggcactggatgagttgcagaaaaaccgtacctctctggtgattgcccaccgcttgtctaccattgaaaaggcagacgaaatcgtggtcgtcgaggatggtgtcattgtggaacgcggtacgcataacgatttgcttgagcaccgcggcgtttacgcgcaacttcacaaaatgcagtttggccaatgatcgaaaaaatctggtctggtgaatcccctttgtggcggctattgctgccactctcctggttgtatggcctggtgagtggcgcgatccgtctttgctataaactaaaactgaagcgcgcctggcgtgcccccgtaccggttgtcgtggttggtaatctcaccgcaggcggcaacggaaaaaccccggtcgttgtctggctggtggaacagttgcaacagcgcggtattcgcgtgggggtcgtaagccggggatatggtggtaaggctgaatcttatccgctgttattgagcgcagataccacaacagcacaggcgggtgatgaacctgtgttgatttatcaacgcactgatgcgcctgttgcggtttctcccgttcgttctgatgcggtaaaagccattctggcgcaacaccctgatgtgcagatcatcgtaaccgacgacggtttacagcattaccgtctggcgcgtgatgtggaaattgtcgttattgatggtgtgcgtcgctttggcaatggctggtggttgccggcggggccaatgcgtgagcgagcggggcgcttaaagagcgttgatgcggtaatcgtcaacggcggtgtccctcgcagcggtgaaatccccatgcatctgctgccgggtcaggcggtgaatttacgtaccggtacgcgttgtgacgttgctcagcttgaacatgtagtggcgatggcggggattgggcatccgccgcgcttttttgccacgctgaagatgtgtggcgtacaaccggaaaaatgtgtaccgctggccgatcatcagtctttgaaccatgcggatgtcagtgcgttggtaagcgccgggcaaacgctggtaatgactgaaaaagatgcggtgaaatgccgggcctttgcagaagaaaattggtggtatttgcctgtagacgcacagcttagtggtgatgaaccagcgaaactgcttacgcaactaaccttgctggcttctggcaactaattacgccgcggcagcgttcgattgatggagtcatgaatgagcctgccgcacctctcccttgctgatgcgcgtaatcttcaccttgccgcacaaggcctgttaaacaaaccccgccgtcgagcgagcttggaggatattccggcaacgatctcccgcatgtccttgctgcaaatcgataccatcaatattgttgcccgtagtccatatctggtgcttttcagtcgtctgggaaattatcctgcccagtggctggatgagtctctggcgcgtggcgaattaatggaatactgggcgcatgaagcctgctttatgccgcgtagcgactttcgtcttattcgccaccgcatgctggcacctgaaaaaatgggctggaaatacaaagacgcctggatgcaggaacatgaggcggaaattgcacagttaattcagcatattcatgataaggggccggtacgtagtgccgattttgagcatcctcgtaaaggtgcaagcggctggtgggaatggaagccgcataaacggcatctggaaggtttatttactgccggaaaggtgatggtgattgaacggcgcaacttccagcgcgtttatgatttaacccaccgtgtcatgcctgactgggatgatgagcgcgatctcgttagccaaacagaagcagaaatcatcatgctggataacagtgcgcgtagcctgggaatattccgcgaacagtggctggcagattactatcggctgaaacgtccggcactggcggcgtggcgcgaagcgagggctgaacagcagcaaatcattgctgtgcatgttgaaaaattgggcaatctttggctgcatgatgatttgctgccgctactcgagcgagcgctggccggaaagctcactgcaacgcacagcgcggtacttagcccttttgatcctgttgtctgggatcgcaaacgcgcagagcagctttttgattttagctaccggctggagtgctataccccagcgccgaaacgccagtatggctattttgttctgccgttattacatcgtgggcaattagttgggcgaatggatgccaaaatgcatcgccagacaggcatccttgaagttatctctctgtggttacaggaaggtattaaaccaacgacaacgctgcaaaaagggctacgtcaggcgattactgatttcgctaactggcagcaggcaacgcgggtgacattaggatgctgcccgcaaggcctctttactgattgccgcaccggctgggaaatagaccccgtcgcataaatgattatgataagatttatgcattcataacccgatccatctggaggaactatggatcatcgtctgcttgaaatcattgcctgcccggtttgcaacggaaaactttggtataaccaggaaaaacaagagcttatttgcaaactggacaacctcgctttcccgctgcgtgatggcattccagtgttgctggaaacggaagcccgcgtgctgactgctgatgagagtaaaagttgatgtaaactgctgatgagagtaaatcatgagttttgtggtcattattcccgcgcgctacgcgtccacgcgtctgcccggtaaaccattggttgatattaacggcaaacccatgattgttcatgttcttgaacgcgcgcgtgaaagtggtgccgagcgcatcatcgtggcaaccgatcatgaggatgttgcccgcgccgttgaagccgctggcggtgaagtatgtatgacgcgcgccgatcatcagagtggaacagaacgtctggcggaagttgtcgaaaaatgcgcattcagcgacgacacggtgatcgttaatgtgcagggtgatgaaccgatgatccctgcgacaatcattcgtcaggttgctgataacctcgctcagcgtcaggtgggtatggcgactctggcggtgccaatccacaatgcggaagaagcgtttaacccgaatgcggtgaaagtggttctcgacgctgaagggtatgcactgtacttctctcgcgccaccattccttgggatcgtgatcgttttgcagaaggccttgaaaccgttggcgataacttcctgcgtcatcttggtatttatggctaccgtgcaggctttatccgtcgttacgtcaactggcagccaagtccgttagaacacatcgaaatgttagagcagcttcgtgttctgtggtacggcgaaaaaatccatgttgctgttgctcaggaagttcctggcacaggtgtggatacccctgaagatcttgagcgcgttcgcgctgaaatgcgctaatttcacttcacgacacttcagccaattttgggaggagtgtcgtaccgttacgattttcctcaatttttcttttcaacaattgatctcattcaggtgacatcttttatattggcgctcattatgaaagcagtagcttttatgagggtaatctgaatggaacagctgcgtgccgaattaagccatttactgggcgaaaaactcagtcgtattgagtgcgtcaatgaaaaagcggatacggcgttgtgggctttgtatgacagccagggaaacccaatgccgttaatggcaagaagctttagtacgcccggaaaagcccgacaactggcatggaaaaccaccatgctggcaagaagtgggactgtccgtatgccgactatttatggtgtgatgacgcatgaagaacaccccggccccgatgtcctgctactggagcggatgcgtggtgttagcgtggaggcaccagcccgaacaccagaacgctgggaacaactcaaagaccaaatcgttgaagccttactggcctggcaccgtcaggacagtcgcggttgcgtcggcgcggtcgacaatactcaggaaaatttctggcccagttggtaccggcaacatgttgaagtgctatggaccacgctcaatcagttcaataacaccggtctgacgatgcaggataagcggatcctgtttcgcactcgcgaatgtctcccggcattatttgaaggctttaacgacaattgtgtgctgattcacggtaacttctgtttacgcagcatgttgaaagatagccgcagcgatcagttactggcgatggtcgggccgggactaatgctttgggcaccgcgagaatacgaactgttccgactaatggataattctctggcggaagatttgctctggagttacctgcaacgcgcgccagtggcggagagcttcatctggcggcgttggttgtatgtgttatgggatgaagttgcgcaactggttaataccggacgatttagtcggcgcaacttcgatctggcaagtaaaagtctcttgccgtggctcgcctgatcactcttgccgtggctcgccactgctaccttttagccactgccagatacggccaagcgtttcatagccaacacgatcgctatgcatcaaccagaccggagaagggattgcccgttcccacgggttaagcgggctgtcgatggccaactgattcgccggggctggtagcggatttaacccttcctgctgaaaaaagatcatcgcccgcggcagatgacttgcggaggtcaccagcaggaaaggggcgtcaccaatcgcctgtttcactgctgcagcttcttcttcggtatcttttggcaaatccagggtgataatttgctcgcgcggcacgcccaggctttgcgcaactctggcacctacttccgctgtactcaccgtattggtttttgctacgcctcccgtgaagatcagtttacttcccggattttcgcgccataagcgaataccttcattcaggcgtggcagactgttattgattaaattagagctcggtgcccactgcgggttccaggtataaccacctccgagcaccacgatatagtccactttttggctattattccatgtcggataggtgctttcgatgggacgcagcaggcggtcggctaccggttgcaaactcaataacaagagcgccagccacccaatgctaataaaaatcttcccggttttttgaaaacggctaaaccacagcagcgccaggccagcgccaataatcaacaacatcagcggaagtggcagcaacatattgccaatcacttttttcagtgtaaaaagcatcctttctggttccttttttaaccatatagcaagggatcgccagcgatattacaccagacgggttcattctcgccgtggctgtgacaaaatagcgtctttatcagaaaacgtcttagccaaccggtggagaaagcaatgcaggatcgcaattttgatgatattgcggaaaagttttcccgtaacatttacggcaccaccaaagggcagcttcgacaggctattctgtggcaggatctcgatcgcgtgctggcggaaatgggcccgcaaaaactgcgtgtgctggatgctggcggtggagaagggcagaccgcaatcaaaatggccgagcgtgggcatcaggtcattttatgcgatctttctgcgcagatgatcgaccgcgcaaaacaggcggcagaagcaaaaggtgtgagcgacaacatgcaatttatacattgcgccgctcaggatgttgctagccatttggaaacgcccgttgatctgatattgttccatgcggtgctcgagtgggtggctgatccccgcagcgtattgcagaccctctggagtgtgttgcgtccaggcggcgtgttgagcttaatgttctacaatgcgcatggtttgttgatgcataacatggtcgccgggaattttgattacgtgcaggcgggaatgccgaaaaagaaaaaacggacgcttagcccagattatccacgcgacccggcgcaggtttatctgtggctggaagaagctggttggcaaattatgggtaagacaggcgttcgcgtgtttcatgattatctgcgcgagaaacaccagcagcgcgactgctatgaagcattacttgaattagaaacgcgttattgccgtcaggaaccgtatattaccctggggcgttatattcatgtcaccgcgcgcaaaccgcagagcaaggataaagtatgagtgaattttcccagacagtccccgaactggttgcctgggccagaaaaaatgacttctccatcagcctgccggtagaccgactctcttttctgctggcggttgccacgctgaacggcgagcgtctggatggtgagatgagtgaaggcgagctggtggatgcattccgccatgtgagtgatgcgtttgagcaaaccagcgaaaccatcggcgtgcgcgccaataacgcgatcaacgacatggtgcgtcaacgtctgctgaaccgctttaccagcgagcaggcggaagggaacgcaatttaccgtctgacgccgctcggcatcggcattactgactactacatccgtcagcgcgagttttctacgctgcgtctttctatgcagttgagcattgtggcgggtgagctcaaacgcgcagcagatgccgccgaagagggcggtgatgaatttcactggcaccgtaatgtctatgcgccactgaaatatagcgtagcagaaattttcgacagtatcgacctgacgcaacgtctgatggacgaacagcagcagcaggtgaaggacgatatcgcccagttgctgaacaaagactggcgggcggcgatttccagctgtgaattgttgcttagcgaaacttccggaacgctgcgtgaattgcaggatacgctggaagcggcaggcgacaaattgcaggctaatctgttgcgcattcaggatgcgacgatgacccatgacgatctgcatttcgtcgatcgtctggtgttcgatctgcagagcaaactcgatcgtattatcagttggggccagcaatccatcgacttgtggattggctacgaccgccacgtacacaaatttattcgtaccgcgatcgatatggataaaaaccgcgtctttgctcagcggttacgtcagagcgtacaaacctattttgatgagccgtgggcgctaacttatgccaatgccgatcgtctgctggatatgcgtgacgaagagatggcactgcgcgatgaagaagtgactggggaacttcctgaggatctggaatacgaagagtttaacgagatccgcgaacagctggcggcgatcatcgaagaacaacttgccgtgtacaaaaccagacaagtgccgctggatcttggtctggtggtacgcgaatatctgagtcagtatccgcgtgcacgtcactttgacgttgcgcgtattgttattgatcaggcggtacgtcttggcgtagcgcaagcagatttcaccggactgccagcgaaatggcagccgattaatgattacggagccaaggtacaggcgcatgtcatcgacaaatattgaacaagtgatgccggttaagctggcgcaggcgctggcgaatccgttatttccggcgctggacagcgccttacgtagtggacgccatattggcctcgacgaactggataatcatgcattcctgatggattttcaggaatatctggaagagttttacgcgcgttataacgttgagcttattcgcgcaccagaagggttcttctatttacgcccacgttccaccacgctgatccctcgttccgtcttgagcgaactggatatgatggtcgggaaaatcctctgttatctctatctcagcccggaacggctggcgaatgaggggattttcacccagcaggaactgtacgacgaactgctcaccctggccgatgaagcaaaactgctgaaactggtgaacaaccgtagtaccggtagtgacgttgaccgtcagaagttgcaggagaaagtacgttctagcctcaaccgtctgcgtcgtttaggcatggtgtggtttatgggccacgacagcagcaagtttcgcattaccgaaagcgtgttccgcttcggagccgatgtgcgtgctggcgacgatccccgtgaagcacagcgtcgcctgattcgtgatggcgaagcaatgccgattgaaaatcatctgcaactcaacgatgaaaccgaagagaatcagccagatagcggagaggaagaataatgattgaacgcggtaaatttcgcagtctgacgctgattaactggaacggcttttttgcccgaacttttgaccttgacgagctggtcacgacgctttctggcggtaacggggcgggtaaatccaccaccatggcggcgttcgttacggcgctgatccccgacctgaccctgctgcatttccgtaacactacggaagccggggccaccagcggtagccgcgataaaggtctgcacggtaagctgaaagcgggtgtctgttatagcatgctcgacaccattaacagccgccaccagcgcgtggtggtcggtgtgcgtctgcaacaggttgccggacgcgatcgtaaagtggatatcaagccgtttgccattcagggactgccgatgagcgtgcagccgacacagctggtgaccgaaaccctgaacgaacgccaggcgcgcgtgctgccgcttaacgagctgaaagacaagctcgaggcgatggaaggcgtgcagtttaaacagttcaactccattactgattaccacagcctgatgttcgatctgggcatcatcgcgcgtcgtctgcgctccgcatctgaccgtagcaaattctatcgtctgatcgaagctagcctgtatggcgggatctccagtgccattacccgttctctgcgcgactacctgttgccagaaaacagcggcgtgcgtaaagcgttccaggacatggaagcggcgctgcgtgaaaaccgtatgacgctggaagcgattcgtgtcacccagagcgaccgcgacctgtttaagcatctgatcagcgaagccaccaactacgtggcggcggactacatgcgtcacgccaacgagcgccgtgtccatctcgacaaagccctggagtttcgtcgcgagctacatactagccgtcagcaactggcggctgagcagtacaaacacgtcgatatggcgcgtgagctggcagagcacaacggtgccgaaggcgatctggaagcggattatcaggcggccagtgatcacctgaacctggtgcaaaccgcactgcgtcagcaggagaagatcgaacgctacgaagcggatctcgatgagctgcagatccgtctggaagagcaaaatgaagtggtggcagaagccatcgaacgccagcaagagaatgaggctcgtgcggaagctgccgaactggaagtggacgagctgaaaagccagcttgctgactaccagcaggcgctggacgtccagcaaacgcgcgcgatccagtataaccaggcgattgctgcgcttaatcgtgccaaagaactgtgccatctgccggacttaaccgccgactgcgccgccgaatggctggaaaccttccaggcgaaagagctggaagcgactgaaaaaatgctctctcttgagcagaaaatgagcatggcgcaaaccgcgcacagccagtttgagcaggcttatcagctggtggtggcaatcaacggcccactggcgcgtaacgaggcgtgggatgtcgctcgcgaactattgcgcgaaggggtcgatcagcgtcacctggcagagcaggttcagccgctgcggatgcgattaagcgaactggaacagcgtctacgcgagcagcaagaagctgagcgtctgctggcagatttctgcaaacgtcagggcaagaattttgatatcgacgaactggaagccctgcatcaggaactggaagcacgcattgcctctctttccgatagcgtgtctaacgcccgtgaagagcgcatggcactgcgccaggagcaggaacagctgcagtctcgcattcagagtttgatgcagcgtgcgccggtttggctggcagcgcaaaacagtctcaaccagttgagcgaacagtgcggcgaagagtttacctccagccaggacgtcaccgaatatctgcaacagttgctggagcgtgagcgagaggcgattgttgaacgcgatgaagtgggcgcgcgcaaaaacgccgtcgatgaagagatcgaacgtttaagccagcctggcggctctgaagatcagcgtctgaacgcgctggcggagcgttttggtggtgtgctgctgagtgaaatttatgacgacgttagcctggaagatgcgccgtacttcagtgcgctgtatggcccgagtcgccacgccatcgtggtgccagatctgagtcaggtaactgaacacctggaaggcttgaccgattgcccggaagatctctatctgatcgaaggagatccgcagagtttcgatgacagcgtgttcagcgttgatgagctggaaaaagcggtagtggtgaaaatcgccgatcgtcagtggcgttatagtcgtttcccggaagtgccgctgtttggtcgtgctgcgcgtgaaagccgtattgaaagcctccatgccgagcgtgaagtgctttccgaacgcttcgccacgctctcctttgatgtacagaaaactcagcgtctgcatcaggcgttcagccgctttatcggcagtcatctggcggttgcgtttgagtctgacccggaagcagaaatccgtcaactgaacagccgtcgcgtcgaactggagcgggcgttaagtaatcatgaaaatgataaccagcagcagcgtattcagtttgagcaggcgaaagagggcgttacggcgctgaaccgcattctgccgcgtctcaacctgttggctgatgacagcctggcggatcgcgtcgatgaaatccgcgaacgtctggatgaagcccaggaagccgcgcgttttgttcagcagtttggcaatcaactggcgaaactggaaccgattgttagcgtattgcagagcgacccggaacagttcgaacagttaaaagaagattacgcgtactctcagcagatgcagcgcgatgcccgtcagcaggcgtttgccctgacggaagtggtgcagcgtcgtgcgcactttagctattctgacagcgcagaaatgcttagcggtaacagcgatctcaacgaaaaactgcgtgaacgtctggaacaggcggaagcggagcgtacccgcgctcgcgaagcgttgcgcggtcacgcagcgcagttgagtcagtacaaccaggtgctggctagcctgaaaagttcttacgacaccaaaaaagagctactcaacgatctgcaacgtgaattgcaggatatcggcgtgcgtgctgatagcggggcagaagagcgggcgcgtattcgccgtgacgagctgcatgcgcaactgagcaataaccgtagtcgccgcaatcaactggaaaaagcgcttaccttctgcgaagcggagatggacaacctgacccgcaaactgcgcaagctggagcgggattactttgagatgcgcgagcaggtagtgaccgccaaagcgggctggtgtgcggtgatgcgcatggtgaaagataacggcgttgagcgccgcttacaccgtcgtgagctggcttatctctccgctgatgatttgcgttccatgagcgataaggcgttaggtgcgctgcgtctggcggtggcggataacgaacatctgcgcgacgtgctgcgcatgagcgaagatccgaaacgtccggagcgtaaaattcagttcttcgtggcggtttatcagcatctgcgtgaacgtattcgtcaggatattattcgtaccgatgatccggtggaagctatcgaacagatggagattgaacttagccgtctgaccgaagaattaacctcccgtgaacagaaactggcgatcagttcccgcagcgtggcgaacatcattcgcaaaaccattcagcgcgagcagaaccgtatccgtatgctcaaccaggggttgcagaacgtaagctttggtcaggtgaacagcgtgcgtctcaacgtgaacgtgcgtgaaacgcacgccatgctactggatgtgctctctgaacagcacgagcagcatcaggatctgtttaacagcaaccgtttgaccttcagcgaagcgctggcgaaactgtatcaacgtcttaacccgcagattgatatggggcagcgcacgccgcagaccatcggtgaagaactgctggattaccgcaactatctggaaatggaagttgaggttaaccgtggttccgatggctggctgcgcgcagagtctggtgcattgagcaccggtgaggcgattggtaccggtatgagcattctggtgatggtggtacaaagctgggaagatgaatctcgccgcctgcgcggtaaagatatctctccttgccgcctgctgttcctcgatgaagcagcgcgactggatgctcgttctatcgccacgctgtttgaattgtgtgagcgtttgcaaatgcaactcatcatcgcagcgccggaaaatatcagcccggagaaaggcaccacctataaactggtgcgtaaagtcttccagaataccgaacacgttcatgtcgtcggcctgcgaggatttgcgccgcaactccctgaaacgcttccaggaactgacgaagcgccttctcaggcgagttaaaattaaggcggcagcaatgccgccttttctttttccgaaaactccgtttctgcactaaaaaagtggcacattacggcgcgcttttctttaaacttctttacattaggttatgtaaaaacgtatcggcgtttatatactgaagataagcctgatgagtaacaggcttgctcgtcatactttcgtgagtattggcgttgtacaggcaagtcgtaaaataacagcctggctattcagagtatgataaaaacagggggcaagggatgttgcttaatatgatgtgtggtcgtcagctgagcgcaatcagtttgtgcctggccgtaacattcgctccactgttcaatgcgcaggccgatgagcctgaagtaatccctggcgacagcccggtggctgtcagtgaacagggcgaggcactgccgcaggcgcaagccacggcaataatggcggggatccagccattgcctgaaggtgcggcagaaaaagcccgcacgcaaatcgaatctcaattacccgcaggttacaagccggtttatcttaaccagcttcaactgttgtatgccgcacgcgatatgcaacccatgtgggaaaaccgtgatgctgttaaagccttccagcaacagctggcagaggtggcgattgccggtttccagccgcagtttaataaatgggtagagttactgaccgatcctggtgttaacgggatggcacgcgacgtggtgctctctgatgcgatgatgggctatctccatttcattgcaaatattccggtcaaaggcactcgctggctatatagcagtaaaccttatgcacttgcaacgccgccgctcagcgtgattaaccaatggcagctggcgctggataaaggtcaattgcctacgtttgttgcaggactggcaccgcagcatccgcaatatgcggcgatgcatgaaagcttactggccttactctgtgacaccaaaccgtggccccaactgaccggcaaagcaacgttgcgcccagggcagtggagtaacgacgtaccggcgttgcgcgaaatattgcaacgcacaggcatgttggacggggggccgaaaattactctacctggcgatgacacgccaactgacgcggtagtcagcccatccgctgttactgttgaaacagcagaaactaagccgatggataagcaaacgacgtctcgtagtaaacctgcgcctgccgttcgcgccgcctacgataatgaactggtggaagccgttaaacgttttcaggcatggcaaggattgggggcagatggtgctattggcccggcaacacgtgactggttaaacgtaacgcccgcccagcgtgctggtgtgttggctctcaacatccagcgattgcgcttgctgccaacagagctttctaccgggatcatggttaacattccggcctatagcctggtctactatcagaacggcaatcaggtgctggatagccgagtcattgtcggtcgccccgatcgcaaaacgccgatgatgagcagtgcccttaacaacgtagtggtaaacccgccgtggaacgtacctccaactctggcacgcaaagatattctgccaaaagtgcgcaacgatccgggatatctcgaaagccatggctatacggtgatgcgcggctggaacagcagagaagcgattgacccatggcaggttgactggtctacaatcacggccagcaatttaccgttccgcttccagcaggctccaggcccacggaacagcctggggcgctataaattcaatatgccgagtagtgaggccatttatttgcatgacacgccgaaccacaatctgttcaagcgtgatacacgcgcattgagcagtggctgtgtacgagtgaataaagcttccgatctggcgaatatgctgttgcaggatgcaggctggaatgacaaacgtatttctgatgcgctgaagcagggtgatacacgttacgtcaatattcggcagagcattccggtgaatctctactacctgacggcctttgttggtgcagatggtcgtacccagtatcgtacagatatttacaattatgatctgcctgcgcgatccagcagccaaatcgtaagcaaagcggaacaattaatcaggtaaatgaagtagttcggggaaatcagttgtcgtaataattagcatgattgggggcgattctctgcagcccccgtcactgctggggttgagtcatcttgacgtctgctttacgggcggttaaggtgcctcttgtgcgccagaagtgcatataaacgataacattgacctgtagacttgattatcatggacaaattcgacgctaatcgccgcaaattgctggcgcttggtggcgttgcactcggtgccgccatcctgccgacccctgcgtttgcaacactctctaccccacgcccgcgcattttgacactcaataatcttcataccggagagagtatcaaagcggagtttttcgatggcagaggctatattcaggaagaattggcaaaacttaaccattttttccgcgattaccgcgcgaacaaaataaagtccatcgacccaggattattcgaccagttgtatcgcctgcaagggttgttaggcacgcgcaaaccggtgcaactcatttccggttatcgttctattgataccaacaatgaactacgcgcccgcagccgtggagtagcgaagaaaagctatcacactaaaggccaggcgatggatttccatattgaaggtatcgcgttaagcaatattcgcaaagccgcgttatctatgcgcgcaggtggtgtaggatattatccacgtagtaactttgtgcatattgataccgggccagcacggcactggtaataattgcttaacgaaacaggggcagtatgaactatcgtattattccggtcaccgcattctcccagaactgtagtttaatctggtgtgaacaaacccgtctggccgcactggtcgatcctggcggcgatgcggaaaaaatcaaacaggaagttgatgacagcggcctgacactgatgcagatcctgctgacgcatggtcatctggaccacgttggcgcagcggcggaactggcgcaacattacggcgtgccggttttcggcccggaaaaagaagatgagttctggctgcaaggcttgcctgcgcaaagtcgtatgtttggtctggaagagtgccagccgctgacgccagatcgttggctgaacgaaggcgataccatcagcatagggaatgtgactttacaggtgttacattgccctgggcatacgccgggtcatgtcgtgttttttgatgatcgggcaaagctgctgatttctggcgatgttattttcaaaggcggagtagggcgcagtgacttcccgcgtggcgatcataatcaactgatttctagtatcaaagataaattgctgccactgggggatgacgtgatatttattccgggtcacggaccattatccacacttggttatgaacgcctgcataatcccttcctgcaagacgaaatgcccgtctggtaaggcacataaaaaagcccgcttttaatgctggcctggatttctggcaaagtgcgctttgtttatgccggatgcggcacgagcgccttatccggcctacaaaatcgtgcaaattcaaaatattgcaggggacgcgtaggcctgataagcgtagcgcatcaggcaatgttgcgtttgtcatcagtctcagcccgcttttcagcgggcttcattgtttttaatgcttacagcactgccacaatcgcttcgcacagcggagccatgttatctggtgtcatcccggccacatttacgcgaccagaagcaaccgcatatacgccaaactcttcgcgcagacgcagcacttgttcttttgtcaggccactgaaggagaacatgccgttctgtttgatgataaagctgaagtcgcggtttgcgcctttttcctgcagcgtattgacgaacaactgacgcatacgctgaatacgctggcgcatatcagtcagctcttgttcccaaatcgcacgtaacgcatcgttgctcaggatggtggcaacaacagaagcgccgtgtgctggtgggttagagtagttagcgcgaatcgccgctttcatttggctgaatgcgcgatcaacggtttcactgtcggcagcaaccagagtacaagcgccaacacgctcgttgtacaggccaaagtttttagagtaggaactggcaacaatcagctctttatgcatagccgcgaaagcgcgcagtccttcagcatcttcttccagaccacgggcaaaaccctggtaagcgaagtcaaacagcggtaaccagcctttctcaacggagagttgtgccagtgtttgccattgttccagcgtagggtcgataccggttgggttatggcagcagccatggaacagcactacgtcgccagcctgagcttcattcaggctgttaatcagtgcatcgaagtcaagagtgtgattttccgcatcataataagcgtattcacgaacttccagacctgcagagttaaagacgctcttatggttcggccagcttgggttgctcacccacacacgcttaacgctggtattttttgccaggaaatcggcagccacgcgtagtgcgccagtgccccccggagtctgtgccgtgcgagcacgtttgtcattgatcagggcgctacctttaccaaacagcagttcctgagtgcagcgaccaaattcagggatgccgtcaatgccgaggtaatttttggtggtttcattttcgagcagatactgttcagcctttttcacgctggtcagtaccggggttttgcccgtctcatctttatagacaccaatcccgaggttaattttgccgggacgttcatcggcacgaaacagatcggccaggcccagaatcgggtcggcaggagcggcggtaatgttctcaaacatgacgaggttccattatggttacagaagggaagtccgctatcagggtaacgggagatttacaaaattccaactattactgatgaaaacgcaggctgtttttgcaagacgtgagattgctctggaaggtataaaaaaaacaggaccaaagtcctgttttttcggcatttaacaaagaggtgtgctattagaactggtaaacgatacccacagcaacggtgtcgtcactacctacgcccagtttgttgtcagaatcgatctggttgatgatgtagtcaacataggtggacatgtttttgttgaagtagtaggttgcgcccacttcaaagtagttcaccagatcaacatcaccgataccttctacgtctttcgctttagatttggtgtaagcgatggacggacgcagaccgaaatcgaactggtattgcgcaactaacagaacgtcttgcgttttgttggcgaagccgctggtgtttgtaaatttattagtgatcggcgtagcgttacgggtttcaccgtagttcgctgccaggtagatgttgttcgcgtcgtacttcagaccagtagcccactgttcagcttttttaccgttgccaagaggttgagcttcttgcaggttggtacggtcagctgcaccataagcaccaacgataccaaagccttcgtattcgtagctgatagaaccgccaacaccgtcgccgttagaacggcgtgcagtgtcacgctcgtttttacccaggtactgaacagcgaagttcaggccatcaaccagaccaaagaagttggagttacgataggtagcaacgccgccaacacgaccaacgaagaagtcatcgctgtatgcagtatcaccaccaaattctggcagcatatcggtgtaacccagtgcatcataaaccacaccgtagttacggccgtaatcgaaagaaccaacgtcagcgtatttaagacccgcgaatgccagacgcgttttgttaccagtttgagcgtcagcgccttcagagttgttaccctggaagttatattcccactgaccataaccggtcagatcggaattgatttgagtttcccctttaaaaccaagacgggcataggtcatgtcgccattgccaccgtaactgttttcaccgttacccttggaaaaataatgcagaccaacagctttaccgtacagatctactttgttgccatctttgttatagatttctgcagcgtttgcagtacctgctactaacagagcagggacgatcactgccagaatattgcgcttcatcattatttattaccctcatggttttttttatgacacctgccactgccgtcaataagttctgtcaataaaaatttacggaactattgatgagagtttggtgtctttatgtgtctgcaggcatctttccattcaaactaacgtttcgctaccgtgaaagtgctacaaagataaagatttggtttcaaaaagaaaaaatatgtaaccaaaagtaaaatttaaggaactttgtgaacaccgtcatatttccatagagacgtgatgatatttacagcaattttaatctatttatatgatttccttatatttaaattaactaaacggaaattttgtttctgatggaaactttatcgacctggcacaaaatcttctttcagacatccagaatgccaaaaaatagtatgaaaattgtgctattagctaagaaaaaactaatccgcaataagaatgcggattagtttttgcgcgtaaatgttgcaatgtaatattccgtaacaggatgatcgttatggcggggttgcaaatagattgcttgacttaacaaacagataacttgacagaaaagataaaaaaagagccagcgggcgctggctcttgaagacgctaaattagaagctggcgttacgcggagtacgtgggaacggaatcacatcacgtacgttttgcacgccagttacgtaagcaatcagacgttcaaaaccaagaccgaaaccactatgcggaacagtaccgtagcgacgcagatcgcgataccaccagtaatcttctttattcaggcccatttccagcatacgctcgtccagcacgtccagacgttcttcacgctgggagccaccaatgatctcaccgatgcccggagccagaacgtccatagccgcaacggttttaccgtcttcgttaaggcgcatatagaacgctttaatatctttcggatagtttttaaccactaccggtgctttaaagtgttcttccgccagataacgctcatgctcagaagagagatcgactccccagtaaaccgggttttcaaacttcctgccgcagttttcgagaatggtcactgcgtcggtataatccacctgcgcaaaatcggcttcaatgaagcgttccagacgactaacggcatctttatctacgcgttcagcgaagaatttcatgtcgtcagcgcgttcttcgagaaccgctttgaagacatatttcagcatggcttcagccagacccgcaatatcgttcaggttagcaaacgccacttccggctccagcatccagaattccgccaggtgacggctggtgttggagttttcagcacggaaagtcgggccgaaggtataaattttggacaatgcgcaagcgtaggtttcgccgttcaactggccagatacggtcaggaaagactctttaccaaagaagtctttgtcgaaatccactttgccctgatcgttacgcggcaggttttccagatccagcgtagaaacgcggaacatttcgcctgcaccttcggtatcagatgcggtaatcagactcgtactaacccagaagaatccctgctcgttaaagaagcgatgcagcgcctgcgccagcgtatggcgaacgcgcgcgacggcaccaatcaggtttgtgcgcggacgcaggtgagcgacttcacgcagatactcaatgctgtggcgttttgccgccatcgggtaagtgtctggatcttcaacccaaccagcaacttcaaccttgctggcctgaatttcaaattgttgcccctggcccgggctcgccacgactttacccgtcacaatgacgctgcagccggtggtcagacgcaggacgtcttcattgtaattgggcagagaattattgatgacagcctgtacaggatcaaagcaggaaccgtcataaacggcgaggaaggagatgccagctttactatctcggcgggtacgtacccatccgcgcacggtgacttcgctgtcaacggctacacggccctggagtacgtcggctacaggcacaacgctcataatattctctctgttaatagtcggaaaaaataaacacttgtccacccgtaaatggggggatacctatgttacctggcatctgcaatcagacaagcagaattcgcaaatgcagcgaaagatttcggaattaaaggtaaaaaaagggagccgattagctccctgatgatattaactggcttttttaatatgcggaaggtcgaacgctttgcgcagcgcccgaacaaacgctttatcatggcagatagttttgccagggctgtcagaaagtttcgccaccggtttaccgttacactctaccaacttaatgacaatattcaggggttttacctgggggatatcgcaggtcaggcgagtcccaataccaaaacttaattgcacgcgggaagagaagtggcggtatagctcaaccgctttgcgtaaatccagattgtcagagaaaaccagcgttttactctgtggatcaattcccagcttttcataatgtgcaatggctttttcaccccattcaaccgggtcgccagagtcatgacgcaggccctgataccgactagcgaactcgacaccgaaatcacgcaggaaagcatccatagtgatgcagtcggttaatgcaatgccaagttggtcgggatactcttccagccaggcagcaagtgcagctcgctggctgttggctagatccgggctgatttgctgatgtgcctggaaccattcgtgtgcctgtgttcccatcggcgtgagggaaagccgacgcgccagatcgtagttgctggtgcccacaaaccaggattcctgttgcagacgcttaacgatggtttcttgtacttcgcgagaaaaacggcgacgggtgccaaaatccatcagatggaagcggctcatatcaagaccggcggttaacgcgctgaagtcgactaatttgctttccagcgtgtcgagggcttgcgcaacgtcggcctgcggactgcgatagcgatgtaccatttcactgataaccgccagcaaaggaacttcccagaggatgacttcacgccacgggccgcttaaacgaatatccagcttgccattatcgttggacacggtgacttgttccgggttaaagcggaactcgcgtaaccagttaagatagtcggccttaaagaaaggcagggcagaaagccactgatattcatcatcctgcaggcgcaggtgctgcatcgcctgaacctgttcacgaatagcatcggcataaatacccagcagatcgtcacctcggcaacgaaactccgccgcgacatgcacatcgtaatagtgatgaaacacggcttgctgcatatgcaacttataagcatctgtatccagcaagctgtgcagaacaggagaagcgaattgtgtcataggtgcgcagtagcgtcctcgtacaggagcgtttagtacaataaacatcttcaggaactgctggagtataccttgtttcgcaatttattgaaccccgatcacaccatatgccacctttctggtcgatggcattacgcggtgtatgttataaaaatgtagcaataaaggcgtttgtacctgaaaagatgaagattctgcatagcgcgatttacgcaacaggaatagactgaacaccagactctataaaagatgctaaaggttatttatgactcaacagccacaagccaaataccgtcacgattatcgtgcgccggattaccagattactgatattgacttgacctttgacctcgacgcgcaaaagacggtcgttaccgcggtcagccaggctgtccgtcatggtgcaagtgatgctccccttcgtctcaacggcgaagacctcaaactggtttctgttcatattaatgatgagccgtggaccgcctggaaagaagaagagggcgcactggttatcagtaatttgccggagcgttttacgcttaagatcattaatgaaataagcccggcggcgaataccgcgctggaagggctttatcagagtggcgatgcgctttgcacccagtgtgaagccgaaggtttccgccatattacgtattatctcgaccgcccggacgtgctggcgcgttttaccaccaaaattattgccgataaaatcaaatatcccttcctgctttccaatggtaaccgcgttgcgcaaggcgaactggaaaacggacgccattgggtacagtggcaggacccgttcccgaaaccgtgctacctgtttgcgctggtggcaggcgactttgatgtactgcgcgatacctttaccacgcgttctggtcgcgaagtagcactggagctgtacgtcgatcgcggcaaccttgatcgcgcgccgtgggcgatgaccagcctgaaaaactccatgaaatgggatgaagaacgctttggcctggagtatgacctcgacatctatatgatcgtcgcggtggatttcttcaatatgggcgcaatggagaataaggggctgaatatctttaactccaaatatgtgctggcccgcaccgacaccgccaccgacaaagattacctcgatattgaacgcgttatcggccatgaatatttccataactggaccggtaaccgagtgacctgtcgcgactggttccagctcagcctgaaagaaggtttaaccgtcttccgcgatcaggagttcagctctgaccttggttcccgcgcagttaaccgcatcaataatgtacgcaccatgcgcggattgcagtttgcagaagacgccagcccgatggcgcacccgatccgcccggatatggtcattgagatgaacaacttctacaccctgaccgtttacgagaagggcgcggaagtgattcgcatgatccacaccctgcttggcgaagaaaacttccagaaagggatgcagctttatttcgagcgtcatgatggtagtgcagcgacctgtgacgactttgtgcaggcgatggaagatgcgagcaatgtcgatctctcccatttccgccgttggtacagccagtccggtacaccgattgtgaccgtcaaagacgactacaatccggaaaccgagcagtacaccctgaccatcagccagcgcacgccagccacgccggatcaggcagaaaaacagccgctgcatattccgtttgccatcgaactgtatgataacgaaggcaaagtgatcccgttgcagaaaggcggtcatccggtgaattccgtgctgaacgtcactcaggcggaacagacctttgtctttgataatgtctacttccagccggtgcctgcgctgctgtgcgaattctctgcgccagtgaaactggaatataagtggagcgatcagcaactgaccttcctgatgcgtcatgcgcgtaatgatttctcccgctgggatgcggcgcaaagtttgctggcaacctacatcaagctgaacgtcgcgcgtcatcagcaaggtcagccgctgtctctgccggtgcatgtggctgatgctttccgcgcggtactgcttgatgagaagattgatccagcgctggcggcagaaatcctgacgctgccttctgtcaatgaaatggctgaattgttcgatatcatcgacccgattgctattgccgaagtacgcgaagcactcactcgtactctggcgactgaactggcggatgagctactggctatttacaacgcgaattaccagagcgagtaccgtgttgagcatgaagatattgcaaaacgcactctgcgtaatgcctgcctgcgtttcctcgcttttggtgaaacgcatctggctgatgtgctggtgagcaagcagttccacgaagcaaacaatatgactgatgcgctggcggcgctttctgcggcggttgccgcacagctgccttgccgtgacgcgctgatgcaggagtacgacgacaagtggcatcagaacggtctggtgatggataaatggtttatcctgcaagccaccagcccggcggcgaatgtgctggagacggtgcgcggcctgttgcagcatcgcagttttaccatgagcaacccgaaccgtattcgtagcttgattggcgcgtttgcgggcagcaatccggcagcgttccatgccgaagatggcagcggttacctgttcctggtggaaatgcttaccgacctcaacagccgtaacccgcaggtggctagtcgtctgattgaaccgctgattcgcctgaaacgttacgatgccaaacgtcaggagaaaatgcgcgcggcgctggaacagttgaaagggctggaaaatctctctggcgatctgtacgagaagataactaaagcactggcttgataaataaccgaatggcggcaatagcgccgccattcggggaatttacccctgttttctcaggcgagtttcagattcaccacgttgcatcacccgttgcaacacctccgcttccagctccgctaatcgcacgctccctaatcgacgcggacgggggatatccactgtcaaatccagaccaatttttccctcttcaattaacagcacccggtcagccatcgctaccgcttcgctcacatcatgcgtcaccaacagtacggtaaagccgtgctcctgccaaagactcacaatcaaatcctgcatctcgagtcgcgttaaggcgtccagcgccccgagcggttcatcaagcaacaataatcccggtcgatgaatcaacgctcttgccagcgccactcgctgtttctgcccgccagaaagtgcggcaggccattcccctgcgcgattctccagtcctaccgcagccaacgctcgacgtgcggcatcgcgccactggcctttaaggcctaacccaacgttatcaatcacgcttttccacggtagcagacgcgcatcctgaaacatcattcgcgtgtcttcctgaatttcagccagcggtgtggtgcccgctaacacatcgcctgcggttggcgtttccagacctgccagcaggcgcagcagggtacttttgccaccaccgctgcggcccaccaccgccacaaactgacctgccggaatatgtaaatccagttggttcaggacgatattttccgcgtaatgtttgcttactgcattgagcaacaatggcgtgccctggttcagacgagcagtattcataccgtggcctccttcaaatgataagccgggttccagcgcaaccagaggcgctctaacagctgcgcgctgacgtcagccagtttgccgagcagggcgtaaagaataatagcgactaccaccacgtccgtttgcaaaaacccccgcgcattcatcgccagataaccaatgccactattggcagaaatggtttcggcaacaatcagcgtcagccacatcaggcccaacgcaaaacgcacgccgaccataatactgggcagggcaccaggcaggatcacatggataaacagcggtatgccggataatccatagctacgcgccatctccaccaacccgcgatcgatattacggatgccatgccaggtgttgatataaatggggaatagcgtaccgagcgccaccagaaagatttttgcggattcatcaatgccaaaccacaaaatcaccagcgggatcagcgccagatgcggcacgttgcgcaacatctgaatactggtatccagcagccgttctccccagcgagatagcccgctaatcagtcccaaaatcaaccccaggcttccgccaatactaaagccaatcagcgcccgccaggagctgatcgccagatgctgccacagttcgccgctggcggagagcgtccagaacgccgtcaccactccttccggactaggcaaaatacgcgtgctcagccagccaacgctggaggccagttgccacaccgccacgatgcccaccggtaaaaaccagggggcaacgcgcaataaccacttcttcactggcgttgccattatttcttccttagctttgcgcgactttacgggggataaaatcattcgccaccgcttcgccttgcggattcagcggctgcggctggggaatttccgggatggcgacatccagaagcgggaacagcaactcgccaacccgatacgcttcttccagatgcggatagccgctaagcacaaaactgtcgatgccaagcgcggcatattcgttgattcgcgcagcgaccgtaggaccatcgcccaccagcgccgtcccggcaccgccgcgcactaagccaacgcccgcccataaattggggctgatctccagattgtcgcgcttgccgttatgtaacgccgccattcgctgttgccctacggaatccgtccgggcgaatgcggcctgtgctttggcgatagtttcatcatcaagatggctgattaaccgctcggcggcctgccacgcttcgtcgttagtttcacgaacaatcacatgcagacgaataccgaaacgaattttgcgtccatgcgcggcagctttcgcccgcacttgttcgattttctctttaaccagttccggcggttcgccccaggtgaggtagagatcaacctgttctgccgccagctcctgggcgacatcactgcttccgccaaagtaaagtggcggatacggctgttgaatcgccgggaagagcagttttgctccgcgcacatgaatatgtttaccgttgaaatcgacggtttctctctgcaataaacgccgccagacctgggtaaattccgcgctggcttcgtagcgctcgctatgatcaaggaacactccgtcgcctgccagctcttgtggatcgctgcctgtgaccaggttaaacaacgcacgtccattactgagacggtcaagcgtggcggcctggcgggcggcaacggtaggactggttacgctgggacgcagggcgacaagaaacttcagccgctgcgtcaccgggatcatgcttgcggcaaccagccacgcatcttcgcaggagcgccccgttggaattagcacaccggtatagccaagacgatccgccgcttgcgcaatttgttgcagataaccgtgatcaaccgggcgactaccttcttccgttcccagataatgcccgtcaccgtgggtcggtaaaaaccagaacatattcagactcataattgttttccttccagttgagtgggctgccagatgcgctggcgaatatcgacttttttcggcaccagacgattttcataaaacagatctgccgtttgctgctgtaaggcggcaacctcggcgttaaccggtttgatggtggtaggagggcgatgatctaagtaagaggcaatcaccggtgccggtaagcccatcgtttttgccagtaaagcgatgctttgctcgcgctggctgcgggttaacgcatcggcctcactaaaggttgccagtacgccctgaataaaagcgccgtttttttctgcatagggacgagctgccagataaaagcttccagtttgattgagatcggtgccgtctttcagcacccgcacgccgccctgtaataatgcagcagagtagtagggatcccagatagcccaggcgtcaacgttaccttgctggaacgcggcgcgggcatcagcgggcgtcaggtaagtgggttggatatcggtaaacttaagtccggcctgacgcagtgcacgcagtaaaaggttgtgactactggaacctttctgaaaggcaactttgtgacctttaagatcggctacggttttgatcgggctgttttctgccaccagaatcacttcggctttgggcttcggtggctcgacgcccacgtacaccaaatcagccccggcagcctgggcaaagattggcggaatatccccggtactgccgagatcaatactgccaacgtttaacgcttccaacatttgcggacccgcggggaactccacccaggagattttactttccggatagcgtttttccagtaactggtggctttttgccagcaccataccaatactgcctttctgatagcctatacgtaacgcttcagggctggattctgcagcaaccgcaaaagtagagacgctaagcaatcccgccagcgccagtttaatgatgttacgcatgggcattacctcgcagagacagaaggtcaggaacctgaacatcgcggcggtgcaatgcctgccagaaagtttctagcgcggtatcaagacgggtttgcagatttggcgtgaactggggtctgtgatggtaatcaattacttgactgtcatcggcaaacacgccgtgcaggatctcctgagctttcagtgcgcttaaaactggtttaagggcataatcgaccgccagcagatgggccacggtaccgcccgtcgccagcggtagcaccactttgccttgcaaagcgcgttctggcagcaggtcgagcagggttttcaacgcaccggaataggcggctttatacacaggcgtggcgacaatcagcccatcggcctgttgcagctgttcggtgaaggtcttgagtgccggactatcgaaacgagcataaagtagatcttccggggcgaagttttgcagattccagtgataaacctctacatccaggccatttagtttttcccgcgcatattccagcaaggagctggagcgagaaggaaagcgaggactacccgccagggtgatgacacgcatactctctccttataaccaattgttctttttttgttaacattgataacaattcggtcagtctgtcggagagacaagaaaattccaaatataaattttgtgtatctttttctgaaaataaactaaagaaagggctttatatatcacgcatatttatttattggatagtcattagatgttgaatcaatgaattactcgttcagttaatatttaaatattcatgaaatctataaattaaagatttgtcacttattggatttagtatgcttgatttaaatggcggacaattattgttattattaagtctaatgtcatttaaaggcattatcatatttacgaagagatcaggatgataacgatgaaaaaaagtgtattgacggcgtttataactgtggtatgtgcaacgtccagcgttatggctgctgatgataatgctatcacggatggcagtgtaacatttaatggtaaagttattgctccagcttgtaccctggtagctgcgacgaaagattccgtggtgactttgccagatgttagtgccacgaagttgcaaaccaatggtcaggtttctggcgtgcaaattgatgtgccaattgaattaaaagattgtgatactaccgtaacaaaaaatgcaacgttcacctttaatggcactgcggatactactcagattacagcgtttgctaaccaggccagttctgatgctgctacaaacgtggccctgcaaatgtatatgaatgatggtacaacggccatcacgccagacacagaaaccgggaacattttgttgcaggatggagatcagacgttgacttttaaagttgattatatcgctacggggaaagcgactagtggtaatgtgaatgcggtaacaaatttccatattaactattattaatagaactcattaattgttttattaattagtacccctccagtgttctggaggggatattcatattttttaagagtgactatttatgaaaacttgcataacaaagggaattgtgaccgtaagtttaacggcaatattactcagctgcagttccgcatgggcggcaggtaaaggcgggattggacttgcagcaacacgtcttgtttatagtgaaggtgaagagcaaattagtctgggtgtacgtaacaccagtccggatgttccttatcttattcagagttgggtgatgaccccagataataaaaaaagtgcagactttattattacaccaccgctatttgtgctgaatccggcaaatgagaatctgttacgcattatgtacattggagcgccgttggcgaaagacagagaaacccttttcttcactagcgtacgggcagtccctagtacaacgaagcggaaagagggaaataccctgaagattgccacacaaagcgtcatcaaacttttctggcgaccaaaaggtttagcgtatcccttaggcgaggctccggcgaaactgcgttgcactagcagtgctgacatggttacggtcagtaacccaacaccttatttcattaccctgacagacctgaaaataggtggaaaagtagttaaaaatcaaatgatttccccctttgataaataccaattttctctgccaaagggggccaaaaatagcagcgtaacgtatcgaaccatcaatgactacggggcggaaacgccgcaactcaactgtaaaagctaagccgtcttcagttaagagagcgagatgtatagaactcatcgacaacacagcctgttaagctctggtggagtgccaagctttattggtgggctggtggtgtttgtgagcgcagcgttcaatgcacaagctgaaacctggttcgatcctgcttttttcaaagatgatcccagtatggtggccgatttgtctcgtttcgaaaaaggacaaaaaataacgccaggggtttatcgtgtcgatattgttctgaatcagacaattgtagatacgcgcaacgtcaattttgttgagataacgccagagaaggggattgccgcctgtttgacgactgaaagcctggatgcaatgggtgttaatactgatgcgtttccggcttttaaacaactggacaaacaagcgtgtgtgccattggcggagattattccggatgccagcgtaacgtttaatgtgaataaactccgtctggaaattagtgtaccgcaaatcgccatcaaaagtaatgcccgtggttatgtcccccctgaacgttgggatgaagggatcaacgcgctattactgggatatagctttagcggggctaacagtattcatagcagcgcagacagtgattctggcgacagctattttctgaatttaaacagtggcgttaatttaggcccatggagattgcgcaacaatagtacatggagtcgtagtagtggccaaaccgcagaatggaagaatctcagcagctatttgcaacgggcggttattcctctgaaaggcgaactgaccgtaggtgatgattatactgcaggcgattttttcgatagtgtcagctttcgtggtgtgcagctggcgagtgatgacaacatgctgccagacagcctgaaagggtttgcgcctgtggtgcgtggtatcgccaaaagcaatgcccagataacgattaagcaaaatggttacaccatttaccaaacttatgtaagccctggtgcttttgaaattagtgatctctattccacgagcagcagcggtgatttgttagttgaaatcaaagaagcggacggcagcgtcaatagctacagcgtaccgttctccagtgtgccattactccagcgtcaggggcgaatcaaatacgcggtgacactggcgaaatacagaaccaatagtaatgaacagcaggagagcaaatttgcccaggccacgttgcagtggggcggaccgtggggaacgacctggtatggtggtggacaatatgctgaatattaccgtgccgccatgtttggtctgggatttaacctcggcgatttcggagcaattagcttcgatgcgacccaggcgaagagtacgctagcagatcaaagcgaacataaaggtcagagttatcgttttctgtatgccaaaacgctcaaccacttgggcactaactttcaattgatgggctatcgctatagcacgagcggtttctacaccctttccgacaccatgtataaacatatggatggctacgaatttaatgacggtgatgatgaagatacgccgatgtggagccgttattacaatttgttttacaccaaacgtggcaaactgcaggtcaatatctcccagcaattaggcgagtacggtagcttttatttaagtggtagccagcaaacttactggcatacggatcaacaggatcggctattacagtttggctacaacacgcaaattaaagatcttagcctggggatttcctggaactacagtaagtcccgtggtcaacctgatgctgatcaggtgtttgctctaaatttttccctgccgctcaatctgttgctccccagaagtaatgatagctataccaggaaaaaaaattacgcctggatgacctctaacaccagtatcgataacgaagggcacactacacaaaacctgggtttaacggagacattactcgatgacggtaacctgagctacagcgtgcaacagggatataacagcgaggggaaaacggctaatggtagcgccagcatggattacaaaggggcgtttgcggatgcccgagtgggctacaactacagcgataacggcagtcaacaacaactgaactacgctcttagtggcagtttagttgcccatagtcagggcattaccctggggcaaagcctgggggaaactaacgttctgattgcagcaccaggcgcagagaatactcgtgtggcgaacagcaccgggctgaaaactgactggcgcggatataccgttgttccttatgccacttcttatcgggaaaatcgaatcgcacttgatgcggcgagcttaaaacgtaacgtggatcttgaaaatgcagtagtcaacgtggttcccaccaaaggggcgttggttctggcggagttcaatgcccatgcgggtgcaagggtattaatgaaaacaagtaagcagggtataccgctgcgttttggcgcgatagcgacgctggacggcgtacaggctaatagcggcataattgatgatgatggcagcctctatatggcgggtttaccggcgaagggaacaataagcgtgcgctggggcgaagctcccgatcaaatttgtcatatcaattacgagcttaccgaacaacaaattaactctgcgattacgcgaatggatgccatatgcagataatctttggagaaaaatgcgtgagtttactacgactattttttgccgccgtcttaatgttatggtgcgctcaaaccgctgcttatagcgggcagtgtcatactactcaggggaatccgtatattggcgtcaattttggcgttaaaaccctggaggaagaagcaaatacggcaggggtagttaaagacaaattttatcagtggaacgaaagcaatgattattatgtttcctgtgattgcgataaagacaatgtcagaagtggccgatgggcattcgccgcggatagtccgttagtctatttaggcgacaactggtacaaaattaatgactatcttgccgccaaagttttattgcaggttaaaggcagttctcctactgcggttcctttcgaaaacgtgggcacagggggggatacccgatggcatatttgcgaccctggcggtcaacgtttaggtgggcagggggcaagcggtaatagcggtagcttttccctgaaaatattgcagccgttcgttggcagcgtcgtcattcctcctatggcgctggcgcgattatatgaatgctacaacatacccgcaggtgattcctgcacgactacaggtacaccggttttagtgtattacctgtctggtacgatcaatagtcttggcagttgttccgtcaatgccggagagacaattgaagttgatttaggtgatgtcttcgctgccaatttccgtgttgtagggcataaacctcttggggccagaacggcagaacttgcaattccagtcaggtgtaacacgggaaacgcgggattagttaatgtcaacctgagtctgacggcaaccacagaccccagctatccccaggcgattaagacgagtcgtcctggcgtgggcgtggtggtgaccgatagccagaacaacattatttcccctgctggtggaacattaccgctctctattcctgatgatgcagacagtatcgcgcgaatgaatgtctatccagtcagcacgacaggtgtaccaccagaaaccgggcgatttgaagccacggcaacggtgagaataaattttgattaacgcgtgaacgtatgaagaaaaaaacgatatttcagtgcgttatcttgttctttagcattcttaacatccatgtcgggatggctgggcctgaacaagttagtatgcatatttatgggaatgtggtcgatcagggctgtgatgtcgccaccaaaagtgcattacaaaatattcatattggtgattttaatatcagtgattttcaggccgcgaataccgtaagcactgctgctgatttgaatatcgatatcaccggttgtgccgctggtattactggcgcggacgtcctttttagcggcgaggctgacacccttgcgccgacactgctcaaactaactgacacaggcggaagcggtggtatggcaacggggattgccgtgcaaattcttgatgcgcaaagtcagcaagaaatcccgctcaatcaggtccagcctcttacgcccttaaaagccggggataacacactcaaatatcaacttcgttataagtccacaaaggcgggagcaacgggcggtaatgcgacggcggttctctattttgatctggtttaccagtgaaggagtgatgttgaaacggataatctggattctgttcttattgggattaacgtggggctgtgagctatttgcccatgatggcacggtcaacattagcggaagctttcgccgtaatacatgcgtgctggcacaggatagcaagcaaatcaatgtgcagttaggcgatgtcagcctgacacgtttttctcatgggaattatggcccggagaaatctttcatcattaatttgcaggattgcggaacagatgtcagcacggttgacgtcacctttagtggaacccccgacggagtgcagagcgaaatgttgtccattgaaagtggtacggatgcagccagcgggctggcaattgcgattctggatgatgcgaagatattgattccgcttaaccaggcgagtaaagactacagcctacatagcggtaaggtgccattaactttttatgcgcaattgcgacctgtcaatagcgatgtgcagagcggtaaagtgaatgccagcgcgacatttgtacttcattatgactaatacgtggaacagattggcgctcttgattttcgccgttttaagcctgctggtggcgggtgaattgcaggcaggagtggtggtcggcggaacgcgatttatctttccggcagacagagaaagcatatctattttactgactaataccagtcaggaatcctggcttattaacagtaaaatcaaccgcccaacgcgttgggccgggggggaagcgagcacagtgccagcaccattactggccgctccgccacttattctcctgaagcccggtacgacaggcacgttgcgcttgctgagaacggaaagcgacatcttgcctgtggatcgcgaaacgctatttgagttaagcattgccagcgtgccatccggcaaagttgaaaatcagagcgtaaaagtggcgatgcgcagcgtatttaaactgttctggcgacccgaaggtttgccgggcgacccgctggaagcttatcaacaattacgctggacacggaatagccagggtgtacaactcactaacccaacgccttattacattaacctgattcaggtgagtgtaaatggtaaagcgttaagtaatgtgggagttgtgccgcctaaaagccagcgtcagacaagctggtgtcaggcaatcgcaccgtgtcatgtcgcctggcgggcgataaatgattacggcgggttgagtgcaaagaaggagcaaaatctgccctgaaacaggttcggaaaacgtttgcgttttttttgccgcaggtcaattcccttttggtccgaactcgcacataatacgcccccggtttgcacaccgggaatccaggagagttcatgtactaccccttcgttcgtaaagcccttttccagctcgatccagagcgcgctcatgagtttacttttcagcaattacgccgtattacaggaacgccgtttgaagcactggtgcggcagaaagtgcctgcgaaacctgttaactgcatgggcctgacgtttaaaaatccgcttggtctggcagccggtcttgataaagacggggagtgcattgacgcgttaggcgcgatgggatttggaagcatcgagatcggtaccgtcacgccacgtccacagccaggtaatgacaagccgcgtctctttcgtctggtagatgccgaaggtttgatcaaccgtatgggctttaataatcttggcgttgataacctcgtagagaacgtaaaaaaggcccattatgacggcgtcctgggtattaacatcggcaaaaataaagatacgccagtggagcagggcaaagatgactatctgatttgtatggaaaaaatctatgcctatgcgggatatatcgccatcaatattagtagcccgaataccccaggattacgcacgctgcaatatggtgaagcgctggatgatctcttaaccgcgattaaaaataagcaaaatgatttgcaagcgatgcaccataaatatgtgccgatcgcagtgaagatcgcgccggatctttctgaagaagaattgatccaggttgccgatagtttagttcgccataatattgatggcgttattgcaaccaataccacactcgatcgttctcttgttcagggaatgaaaaattgcgatcaaaccggtggcttaagtggtcgtccgcttcagttaaaaagcaccgaaattattcgccgcttgagtctggaattaaacggtcgcttaccgatcatcggtgttggcggcatcgacagcgttatcgctgcgcgtgaaaagattgctgcgggtgccagtctggtgcaaatttattctggttttatttttaaaggtccgccgctgattaaagaaatcgttacccatatctaattatttcttcgaattcctctttataagataatcagggctttattttcagccctggttgttttatattcatcgctgttgcttatttagacattttgtacttttattgttgaggttattaagcgaagcgacaatggattgtgttgctgcggttttatagggtaggggagaggcagatgcgaattaaaccagacgataactggcgttggtattacgatgaagagcacgatcgaatgatgctcgatttagccaatggtatgctatttcgcagtcgttttgcgcgcaagatgttgactccagatgccttttctcccgcaggcttttgcgttgacgacgccgcgctctatttctcttttgaagaaaagtgccgcgattttaatttatctaaagaacaaaaagccgaactggtgctgaatgcactggtagcaattcgctatctcaaaccgcaaatgccgaaaagctggcattttgtttcccatggtgaaatgtgggtgcccatgccgggcgatgcggcctgcgtttggttgagcgatactcacgagcaggtcaatttgctggtcgttgaatctggcgaaaatgccgcactatgcctgctggcacaaccctgcgttgttattgcgggtcgcgcgatgcagttgggcgacgccattaaaatcatgaacgacaggctgaaaccgcaggttaatgttgacagcttcagcctcgaacaggcagtttaacgcgccaacttaagtgcagtcttcggtacacagctacagcaaagaatggtgccatcatcgcccattgcactttttttcagcggcgtgacttcgccttctaaaagctgaacacggcaacttccacaaatgcccgcgcggcaagaataagggatacgaattccctgattttctaattgctccagcaacacctgttggttatttccacgaaatgcctgtccctgccagtcaatatctacatttgcgtccggttgttgcgtgatgttggcggtatcatcagcggcagctgcgccgtaaatttttgccggagccgttgccagaatttccacctcatcgccaacgcgaatcacgccgctattacgggcaattaaattctgaccaaaatcgacatcgccgttatcctgggcagtgcggaaagattgcaatgtttttaatggttcgcctgccggatgtttttgccctttttctgggctgacggtggtgaaaatacagcggctacaaggtttaaccacatcaaacaccacatcaccaatgcgaatcactttccagcgatcttcttcccaggcactcgcgccggaaaccaccagattggggcggaattgctccatttttacactggccggacaacgttgttggagatcacgtaagctggcttcgttagcaagaaggtaaggatagccatcagcaaaactcagaggtacagtgttgtggcgtttcacgcgccgggtcatttgtggccccacccagcgtaattgcacttcgcgggagaaaaatccacttagccatttgttgatcgcgtctggcgcaattcgcgcggtaaaatgtgtgccccaaacttcggttggtgcgtcttgtgtggcgaaatcagcaaaacgaacatatgcgctactgccatctggtgcggtgagatgcaagccatcatgcacaggactaggagtaaaccgtaccatctggggaaactggcgagcggtaataaacgtaccgtcaggttccgtgatcataaagatgcgatcgaaggccagaccactgacatctgccagagcatgtgtaagaccaatgccgcgcatgcttttaacaggatgaataaaaagccggattaatgtcgccacggtgcggtcctcaaatgaaaataagccctcaactttatgacatgacgcgcttattagctataatgcgcaacaattttcttagcgcctgtcccattaggctattttatttgtcagtttggccctgggttatgctcgaaatcctcacgtacttgtgtacgctccggtttctccgcgctgtccatgtccagactgactgcaacaattacgcctactgcggtaggctcttagagtaaaagtgacgatatgaattctctgtttgccagtacggcccgtgggctggaagagctgttaaaaactgaactggaaaacctgggggccgttgaatgccaggtggttcagggtggggtccatttcaagggcgacacacggcttgtttaccagagcctgatgtggagccgcctggccagccgtattatgttgccgctgggcgagtgtaaggtttacagcgatttagacctctatctcggtgttcaggcgatcaactggacagagatgtttaatcctggcgcgaccttcgctgtccacttcagtggtttgaatgacaccatccgcaacagtcagtacggcgcgatgaaagtgaaagacgcgatcgtcgatgctttcacgcggaaaaatctgccgcgtccaaatgttgatcgcgatgcgccggatatccgcgttaacgtctggctgcataaagaaaccgccagtatcgctcttgatctgagtggtgatggtttacatctgcgtggctatcgcgatcgtgctggtattgcgccgatcaaagaaaccctggcagccgctattgtgatgcgatccggctggcagccaggaacaccgctgctcgatccgatgtgtggttccggtacgttgctgattgaagcagcgatgctggcgaccgatcgcgcaccaggcttgcaccgtgggcgttggggctttagcggctgggcgcagcatgatgaagctatctggcaggaagtgaaagcggaagcgcaaactcgcgcccgtaaaggcctggctgagtatagctctcatttttacggtagcgacagcgacgcacgggtgattcaacgtgcacgcactaacgcccgtcttgcggggattggtgaactgatcacctttgaggtgaaagatgtcgcgcaactgaccaatccgctgccgaaagggccgtacggcacagtgttgagcaacccgccatacggggaacgtctggacagcgaaccggcgctgattgcgctgcatagcctgctgggtcggatcatgaaaaaccagtttggtggctggaatctctctttgtttagtgccagcccggatctgctaagctgcttgcagctgcgtgcagacaaacagtacaaggcgaaaaacggcccgctggactgcgtacagaaaaattaccacgttgccgaaagcactccagacagcaaaccggcgatggtagcggaagactacaccaaccgcctgcgtaagaacctcaaaaaattcgagaagtgggctcgccaggaagggattgaatgttaccgcctgtatgacgccgatctgccagaatataacgttgccgttgaccgttatgccgactgggtggtggtgcaggagtatgcgccgccaaaaactattgatgctcacaaagcgcgtcagcgtctgttcgatattatcgctgcaaccattagcgtactggggattgcgccaaacaaactggtgctgaaaacccgtgaacgccagaagggcaaaaaccaataccagaaactgggcgagaagggcgagtttcttgaagttaccgaatataacgctcacttgtgggtgaacctgacggattatctcgatactggtctgttcctcgatcaccgcatcgcccgtcgtatgctcggtcagatgagcaaaggcaaagatttcctcaacctgttctcttataccggcagcgccaccgtgcatgcgggattaggcggtgcacgcagcaccaccaccgtggatatgagccgtacttatctggaatgggcagaacgcaacctgcgtctgaatggcctgaccgggcgtgcgcatcgcctgattcaggccgattgcctggcgtggctgcgtgaggcaaatgaacagttcgatctgatctttatcgatccgccaaccttctctaacagtaaacgaatggaagatgcgtttgatgttcagcgcgatcatctggcgctgatgaaagatttgaaacgtctgctgcgtgcaggtgggacgatcatgttcagcaacaacaaacgtggcttccgtatggatctcgacggcctggcaaaactgggactgaaagcacaagaaattacgcaaaaaacgctctcccaggatttcgcccgtaaccgccagatccacaactgctggctgattaccgcagcctgaaaggaatagtaatgagtttaatcagtatgcatggcgcatggctgagcttcagcgacgcgccgcttctcgataacgcagaactgcatatcgaagataacgaacgtgtttgtctggtgggccgcaacggcgcaggcaaaagcacgttaatgaaaatcctcaaccgtgaacaagggctggatgacggtcgcattatttacgagcaagatttgattgtagcgcgtctgcaacaggatccgccgcgtaacgttgagggtagcgtttatgatttcgttgccgaaggcattgaagaacaagcggaatatctgaaacgctatcacgatattagccgcctggtgatgaacgacccgagcgagaaaaatctcaacgaactggcgaaggttcaggaacagctggatcaccacaacctgtggcagctggaaaaccgcatcaacgaagtgctggcgcaactggggttagatcctaacgttgcgctgagcagcctttccggcggctggttgcgtaaagcggcattaggacgcgcgctggtgagtaatccgcgcgtgctgttgcttgatgaaccgacaaaccacctggatattgaaaccatcgactggctggaagggtttttgaaaactttcaacgggacgattattttcatctcccacgaccgtagctttatccgcaatatggcgacgcgcattgttgatctcgatcgcggcaagctggtgacctatccagggaattacgaccagtacctgctggaaaaagaagaagccctgcgcgtggaagaattacaaaatgccgagttcgatcgcaaactggcgcaggaagaggtgtggatccgccaggggatcaaagcacgccgtacccgtaatgaaggccgcgtacgcgccctgaaagcgatgcgtcgcgaacgtggtgaacgtcgcgaagtgatgggtaccgcaaagatgcaggtggaagaggccagccgctccggtaaaatcgttttcgaaatggaagacgtttgctaccaggttaacggtaagcaactggtgaaagatttttctgcccaggttctacgtggcgacaaaattgccctgattggtccgaatgggtgcggcaaaaccacgctgctaaaactgatgctcggtcagcttcaagcggacagcgggcgtattcacgttggcaccaaactggaagtggcttatttcgatcagcaccgcgcggaactggatcccgataaaacggtgatggataaccttgccgaaggtaagcaagaggtgatggttaacggcaagccacgccacgtattgggctatttgcaggactttctgttccatccgaaacgggcgatgacgccggtacgtgcgctttctggcggtgagcggaaccgcttgctgctggcgcgtttgttcctcaaaccaagcaacttattgattcttgacgaaccgaccaacgatcttgatgtcgaaacgctggaactgctggaagaactgatcgacagctatcagggcacggtattgctggttagccacgatcgtcagtttgtcgataacaccgttacagaatgttggatcttcgaaggcggcggtaaaattggtcgttatgtcggcggttatcatgatgcccgtggtcagcaagagcagtatgtggcgctcaaacagcctgcggtgaaaaaaaccgaagaagccgccgcggcaaaagcagaaactgtaaaacgcagcagtagcaaactaagctataaattgcagcgcgaactggagcagctaccgcaattgctcgaagatctggaggcgaagctggaagccctacagacgcaagtggcggatgcttccttcttcagtcagccgcatgagcagacgcaaaaagtgcttgctgatatggctgctgcagagcaggagctggagcaagcctttgaacgctgggagtatcttgaagcgttaaaaaatggtggctgatcgcaaaatagtcgatttaaacagagacagctgacaacggtaaaattgcctgatgaactgggtttatcaggcatgaaaaccaacactttgttagtcatctgtaaaatagcgcatcattaaggagtaccaatgtgcgaacatcatcatgccgcgaagcacatcctgtgcagccagtgtgacatgctggtggcgttaccgcgccttgagcatggtcagaaagcggcatgtccccggtgtggcacaacgttaaccgtggcgtgggatgcccctcggcagcgtcccaccgcctatgcgttggctgcactgttcatgctgttgctgtccaacttgtttccttttgtgaatatgaacgttgcaggagttaccagtgaaattacattactggaaattcccggcgtgcttttttctgaggactacgccagcctcggcacctttttcctgttgtttgtgcaactggttcccgcgttttgtctgataaccattctgttactggtgaatcgcgcggaattaccggtccgtttaaaagagcaactggcacgggtgctttttcaactcaaaacctggggaatggcggagattttcctcgcgggtgtgctggtcagtttcgttaaactgatggcttacggcagcattggggtaggcagcagctttctcccctggtgtttattttgtgtcctgcaactgcgcgcttttcagtgcgttgatcgtcgctggttatgggacgacatcgccccgatgccagaactgcgccagccgctaaaaccaggcgtcacggggatacgtcaggggctgcgtagctgctcctgttgtacggcaatccttcctgctgatgaacccgtgtgcccgcgttgtagtaccaaagggtacgttcggcgtagaaacagcctgcagtggacactcgcgctgcttgtaacgtccatcatgctgtatcttccggctaatattttgcccatcatggtgacggatttattaggcagcaagatgccgagcacgattctcgctggggtcattctgttatggagcgaaggctcttatcccgtcgctgcggtgatctttctggccagtattatggtgccaacgttaaagatgatcgccatcgcgtggctgtgttgggatgccaaagggcatggcaagcgcgacagtgaaagaatgcatttgatttatgaagttgttgagtttgtaggccgctggagcatgattgacgttttcgttatcgcggtgctcagcgcgctggtgcgtatgggaggtttaatgagtatttatccggcaatgggtgcattaatgtttgctttagtcgtcataatgacaatgttttctgctatgacgtttgacccgcgtttgagctgggatcgtcaacctgaaagtgagcatgaggagtcctgacagtatggaatctaataatggggaagccaaaatccagaaagtgaagaactggtctcccgtgtggatatttcctatcgtcacggcgctcattggggcctgggttcttttttatcattacagccatcagggaccggaagtgaccctgatcaccgcgaatgcggaaggaattgaaggtggcaaaaccaccattaaaagccgtagcgttgacgtcggcgtggttgaaagcgccacactggctgatgatttgacgcacgttgaaatcaaagcgcggctgaattccggtatggaaaaattgctgcataaagacaccgtcttttgggtggtgaaaccgcagattggtcgcgaagggattagcggcctgggaacgctgctgtctggagtttatatcgaactgcagccaggcgcgaaaggcagcaaaatggataaatacgatttgctggacagcccaccgttggccccgcctgatgcgaaaggtatccgtgtgattctcgatagcaaaaaagccgggcagctcagcccaggagatccggtgctgttccgtggctatcgggtaggtagcgttgaaaccagcaccttcgatacacaaaaacgcaatatcagctatcaactgttcatcaatgcaccttatgaccgactggtgaccaacaatgttcgcttctggaaagatagtggcattgcggttgatctgacgagtgcagggatgcgtgtggagatgggcagtttgacaacgctgctgagtggcggtgtcagctttgatgtgccggaaggtctggatttagggcagccagtggcaccgaaaacagctttcgttttgtatgatgatcagaagagcattcaggatagcttgtacaccgatcacattgattatctgatgttctttaaagatagcgtacgcggtctgcaaccgggagctccggtagagttccggggtattcgcctgggtaccgtaagcaaagtgccattctttgcgccgaatatgcgtcagacatttaacgatgattaccgtattccggtactgattcgtatcgagccagagcggctgaaaatgcagcttggcgaaaatgcggatgttgttgagcaccttggcgaattgttgaaacgtggtttacgcggaagcctgaaaaccggaaacctggtcactggtgcactgtatgttgatctcgatttctatccaaatacgcctgcaataaccggtattcgtgaatttaatggttatcagattatcccgaccgttagcggcggcctggcgcaaatccagcaacgactgatggaagcgttggataagatcaacaaactgccattgaatccgatgattgaacaggcaaccagtacgctttctgaaagtcagcgcacaatgaaaaacctgcaaacgacgctggatagcatgaacaagatcctcgctagccagagcatgcagcagttgccgacggatatgcagagtacgttgcgtgaattgaatcgcagcatgcagggcttccagcctggctccgcagcctacaacaagatggtggcggatatgcagcgccttgatcaggtgttgcgagaactgcaaccggtgctgaaaacgttcaatgagaagagtaacgcgctggtatttgaagcgaaggacaaaaaagatccagagccgaagagggcgaaacaatgaaaaagtggctagtgacgattgcagcactgtggctggccggatgcagctccggcgaaattaataaaaactattaccagttacctgtggtgcagagcggtacacaaagtaccgccagccagggcaatcgtctgttatgggtagagcaggtcactgttcctgactatctggcggggaatggtgtggtttatcaaaccagtgatgtgaagtatgtgattgccaacaacaacttgtgggccagcccgttggatcaacagttgcgcaacaccctggttgccaacctgagtacgcaactgcccggctgggtggttgcctcccagcctctgggaagcgcccaggacacgctcaatgttaccgtaacggagtttaacggtcgctatgatggcaaggtcattgtcagtggtgagtggctgttgaaccaccagggacaactgatcaaacgtccgttccgtctggaaggagtgcaaactcaggatggttacgatgagatggttaaagtgctggccggtgtctggagtcaggaagccgcttctattgcacaagagataaagcgtctaccttaattataaagatttgtaaatataaccgtctccggtatgttgcctgaggcggtttttttgtctctaacgtgcggaaaaatttgttcctcttcacattttttgtacaaccgacatgcccgtgtagctcacaaatatgacagtggcgtgaattttgcgcattgacggcagttatgattcgcggtattgcttaactgtgattgcacatttagtaatcactgttttcttttccaccagaaaccagtatgagggaaacgaggcatgaagagacaaaaacgagatcgcctggaacgggcacatcaacgtggttatcaggccggcatcgccggacgcagtaaagaaatgtgtccctatcagacgctgaatcaaaggagtcaatggctgggaggctggcgagaagccatggcggacagggtagtaatggcctgattctgtctctttaaaaagaaacctccgcattgcggaggtttcgccttttgatactctgtctgattataatcagaaggcagacgtatcctggaacagaccgactttcaggtcgctggcggtatagatcagacgaccatcaaccagcacttcgccatccgccaggcccataatcagacgacggttaacaatgcgtttaaagtgaatacggtaggtcacttttttcgctgtcggcagtacctgaccagtgaatttcacttcgccaacgcccagcgcgcggcctttaccttcgccgcccagccagccgaggtagaaccctaccagctgccacattgcgtccaggcccaggcatcccggcataaccggatcgccaataaagtggcatccgaagaaccacagatccggattgatatccagttctgcttcaacataccctttgtcgaagttaccacccgtttcggtcattttgaccacacggtccatcatcagcatgttcggtgctggcaattgcgggcctttagcgccaaacagttcaccgcgaccagaggcaagaaggtcttcttttgtataggattcgcgtttatctaccatgttctctgtaagccttattttattgaagcacgcaggatagctaacacgtgtacgctgaacaagtccgatcagttcggaataaaccagttcagccaacgtaatggccatggaaaacggtgacgtccttcctgttggcttgcttgcgcgatacgttcctggatggtttgcatcagcgtcgtttggccttcgccatcccacaccagatttaataataacggcagtgcgtcagtcacatcgtctactgcccagatggtgaatttgccttcttctaccgctttcaccagttcactgtgaagacttaaatggcgaacgttagctgtggggataatgacaccttgtttcccggttaactcacgttgctggcaaatagcaaagaagccttcgattttctcatttaaaccaccgaccggctgggcgcgaccgaactgatcgacactacctgtgatagcgatactctgattcaccggcacatcggcgagggcgcttatcagggcgcagagttcagccatgctggcactatctccatcaacttcactgtaactctgctcaaatgtcaggcttgcactgaaggggatctgttgctcaagctgtagttcgctcatcaggaacgcttgcatgatcatcatccctttcgcatggatattgccgccaagctccgctttgcgttcgatgtcggtgaattcaccatcgccaatatgcacaacgcagctaatgcgagaaggttcgccaaaagcgcgtggatgacccggaaattcaatgacgctaagggcgttaatttgcccgatgcgttcgccttcggtttcaatcaggatttgctcctgaaggatctcatcctgcatacgttcagcgaggaaaccttcgcgccattcacgctgctgcagcattaagtttagctgctcgccggagaaggtgtcgccatcacacagggaggcgacctctttacactggcggaggatccactgcgggctaagcggaagtgtttcttgttcaccggtgtagcgtgctgcttcgcggataagtatcggccaggcatccgctcccggtgcaggtaagtgattatgtctggcggtaaatgtcacccagcgacaccactgggttacactctccgcatcgacaatctgcagagtatcttcaaattcgctataaatagcctgctcactaagctctggctccatctcctggaaatcagccaaactttcgcgttcgcctaccagaatgactttcagcttcaatggcatgctaggcacagagacggggagagggcggctctcatcaaacgcaacccagtcaaaacgctcgcggttaacgatatttttcagccgcatccacagcagaggttgcgccagcagtgtacgcaaagagataatgagaataccgccatttgcctgatgcaccagaccaggctgcagggtaatgtcgccattaaactggcgcaggcagccaaagagttgctccgcttctacccagtcggcagcgacaacttgcgttaaagtcgcaaaattatcatctgcactcactgcgtgacgtaagcggatggagtggccggaaacctcatagtgaccgcccaccagttggcctgcatcgctttgtagcgtacgcgcggcattggcaataagattcagatactcagactcttccggggccttcgccagcataaaagaggaggatgctcgcgtatgcagcaactgctccagcgcaaattgcagccgcggttgagtatcactgaataaaggatcgttttcgtcaatcaaatgtggctgagcaaatatttcctgatagctatcggtatcaggaaccaggtcacgccatgcaagtttcgtaatggtcaaagttgatgttttttagtctgttgtcaaagccgcgattataccgtaaccggcactacagcacacgtagaaagcaccgacaatactcctggcatgggcgttaaagctcacaggatggagattcttttcttcactggcctaaaaagctgatattctgtaaagagttacacggtaacattgagatcgctatgaaatatcaacaacttgaaaatcttgaaagcggttggaaatggaagtatctggttaagaagcatcgcgaaggggagttaatcacccgttacatagaagccagtgccgcccaggaagccgtcgatgtgttgctcagcctggaaaatgaacccgtgctggtaaatggctggattgacaagcatatgaatccggaactggtcaatcgcatgaagcaaaccattcgggcaagacgaaagcgccattttaatgcggaacaccagcatacgcgcaaaaaaagcatcgatctggaatttattgtctggcaacgtctggctggtcttgcgcagcgtcgcggtaaaacgctttctgaaacgattgttcagctgattgaagatgcggaaaacaaagagaaatacgcgaataaaatgtcttctctgaagcaggatctgcaggcattgctgggtaaggaataactgacgaaagtcagttcaatttactaaaggcaaaaaaaaccccgcagcagcggggtttttctaccagacgagaacttaagcctgcggctgagttacaacgtctttgatacctttaacttcgatctctacgcgacgatccggagccaggcagtcgatcagtgcagcacgctgtttcacgttgtcacaggtgttgccagtaaccgggttggattcgcccataccacgtgcggagatcttgtctgccgggatacctttggagatcaggtaatcaacaacagactgagcacggcgctcggacagaccctggttgtaagcgtcagaaccgatgcggtcggtgtaacccagaacaactacggaaccgtctttcggatccaggttgctcagctggctgtacagctgatccagagcagcctgaccttccggtttcagggttgctttgttgaagttgaacagaacgtcagacttcagagtgaagtgcttggtctgtacttccggtgccggagctggagccggagcaactactggagctgcttcgccctgaccgaaacggtaggaaacacccaggctcagcatgccgttgtccggacgagtgccgatggtgtgtgcgtcaccgatgttgttggtccactggtattccagacgggtagcgatttcaggagtgatcgcgtactcaacaccgccagcgaagaccggagaaacgccggtgtcgtggtttttaccataaacgttggatttagtgtctgcacgccataccatgccacccagacgagtgtagatgtccaggtcgtcagtgattgggtaacccagtttagcggtcagttgaacgccctgagctttgtatgcaccgttttcaacgctgcctttgtacggcatacgacctaaccagtcgtaacccatttcaaagccaacatacgggttaacctggtaaccaccaaaagcaccagcgcccagttggttttcatgggtcgggccattgttgttgatgaaaccagtgtcatggtactgggaccagcccagtttagcaccagtgtaccaggtgttatctttcggagcggcctgcgctacggtagcgaaaccagccagtgccactgcaatcgcgatagctgtctttttcattttttgcgcctcgttatcatccaaaatacgccatgaatatctccaacgagataacacggttaaatccttcaccgggggatctgctcaatattaactctaccgatatcttcggcttatgccgagcacccctggcgatgtaaagtctacaacgtagttgaaaacttacaagtgtgaactccgtcaggcatatgaaaaaaaagtcttgtataaggtatgtttaatcttttttgtcagcgacaatttacagaagagaatcgcggaaaccgcttcagacaagcctccgcaaggaaaattagtcacgactgaaagcattggctgggcgacaaaaaaagttccaggattaatcctaaatttacttaatgatacaaattagagtgaatttttagcccggaaagttgtctcgtggcgtgagaggatgcgcttaccggacgcataataaaccccatagcgttaccttcatttgccgcatcaacaagttcagcatgctcttcttcagtcaaatcatctgccaaccaaccgatcaccacactgtaattgcccgtgcgtaaagcgcgaaccatactctccacagtgtggcaaggggagagctggctaatctgcattactttcgttaagggtagcccagatgcctgaacccattcccgactcagtttttgttgcggtgttaaccagagttgccagcggctttgctgaccgagttgctgtaacaatggcaacagtagaagttgcgtcatcatgggctgatcttcgcgatagacaacttcactgataagcccggctgtagtgttttccgtagagacacgcgcaattttacttgctgcggaactgaagctgctagaacgatgtgcatagccactagtgtacataatcaatccagcccctgtgagttactgtatggatgtacagtacatccagtgacaacaaagatcaaccctattttcggaaagagcctcgcaaattttgtcgttggtgacgggaaaacataaattaatcttgccccttaagaataagttgcctattttcgtagttaacggatccgttaatgtgaatcattcttttatgttatgattttaaaaggaattttatgaaaagcctctcctataagcggatctataaaagtcaagaatacctggcaacgttgggcacaattgaataccgaagtttgtttggcagttacagcctgaccgttgacgacacggtgtttgcgatggtttctgatggtgagttgtatcttcgggcttgtgagcaaagtgcacagtactgtgtaaaacatccgcctgtctggctgacatataaaaagtgtggccgatccgttaccctcaattactatcgggttgatgaaagtctatggcgaaatcaactgaagctggtgcgtctgagcaaatattctctcgatgcagcgctgaaagagaaaagcacgcgcaatacccgggaaagactgaaagatttgcccaatatgtcttttcatctggaagcgattctcggggaggtggggattaaggatgtacgggcgttacgtatacttggggcaaaaatgtgttggttgcgactgcggcagcaaaacagtctggtgacagaaaagattctgtttatgcttgaaggtgccattatcggcattcatgaagctgcgctcccggtggcacgccgccaggagcttgcagaatgggctgactctcttacgccgaaacaggagtttcctgcggaacttgagtaattacgcgctaacaggagtttcctgcggaacttgagtaatctggcgttgcagacgaccaatctcaggcagtaatgcaatcaataatccaacttgttgtacgaccagaggttctttgctgtctgcccgtggttcaagttgctgcatccgctgtttcaggctagctaatgcctcattgacgcgttcttcatcagcaggttgatgatgtaacgcgtcatcaacatagcaaactgcgtcatcaagaaacgccagaatttcaggattagttaactgctcccggtgagcaccgagggcactgatatagctggtaaacgtatggttaaggcacagcaaccgaaacgcggcttcgcgaatttgcggggtaacgttcggctcgctggacatattacttaccacgctcgccagctcagcatcacggttgtgtgcatcgcggcgggcaatacgatacgccagacggttatcacgcccctgatggtattgctccagtatggcatcgagataccgacagttggcctctgtggcacgttcgagcatgcgcggcagattgcgaaactgccagtcaggccagatgtagctcactgccgcccacgcaatggcacaaccaatcagcgtatcgattacgcgaggtaacgctacttcaaaaccttcacccagtaagttaaaacacagtagcaccaaaagtgtgatgaacatcgttgcatgagcgtattgcacgttacggaaggcaaaaaagagcacgccggtaataaccagcagcaccagctgcccttccagacttggcacaaaccacagcacaggaatgccaatggcgatacctaccagcgtaccaataatccttaacttcaggcggtggcgcgtggcgttatagtttggctggcagacaaacaaacttgtcagcaagatccaatacccgtgatgcattccggttatctgaatgatggcgtagccgaagcacaacaccaggctcattcttaccgcatgacggaagagggcggattccggcgtgaagtgacggctaagacgcagccagatatcactcaacccgtgcgggctgtcatcagcgagctcattttcgtcattattatggggtagtgcctgggcctgttcactttcaattgttgccagttgggcatcaatggcgcgtaaattgttcagcaaaaatcccagtgttttgagtaaatcggcgggtgcgccgttatcgcgcatccgctccagcgcagcatcaatatgcgtaaaagcgcgctcaaaatgcggatcatgttgataaggctgacgcaacaaaatacagcgactcagttgctggcacgcctggccctgcatgctcatcagccgctgaaaacggaacagcacgtcgctgtggcgaaaatgttcacgcaatgtttgatactgaatatgagaagagctggcacgctcgtgaatatcctgtgcgacaaagtaataatgcagcgtgcgacgcgttccccgttgaccacgatcgccacgtaagcgggtcagcaggctgagtttcgtctgattcaatgtcgccatcagcagaccgttggcgagagccaaatcgtacagcggtgcctggctttgatcttcaatatcaggatcaaacatgcggctcttgagctcaagataacgcgccagttgttcatagcaacgcgccaggttgtcctgcagcgggcggaccgggaacagcagatgaccaataagtgtcaggacgttgtaccagacggcaccggccagcagatacatcggctgctgataccagtgctcatacagacttgttcccaacatagtgtaaatggcgatcagcaatgcaccgaaggcaattgttgcatagcgttgacccagaccgccgagcaaaatgaagccgctggtagagagcgttaagccaatcgcaaatagccagggccagggaaacagcaattctacactggcgctggcgataaaaaagcagaacagcgtaatgatgaggttacgcaaacgtcccgccagtcggtcatcgagatcggtcagcgccgctgccaccatccccagcgttagcggaatcgtcagttttacatcacccagccaccacggaaacgctgtggttccacaaagcgcaataaaaatacgcgcgtaatacagccaggcgctgttccaggtatagcgtttgagcaaaggacttagcataaaggccatattagtggattattcaaaacgacgacgtgcattggcttcacgcgcagcttgcgctgtttctacgcttaccacgcgacgaccaaccggccatagtgcaatagcggcaattttaaagttcgcaatgccgacaggaatgccaatgatactaatacattgtgcgatgcccgttgcaatgtgcatcaggcataaccaccagccaaagaaaatcagccagaaaatattcaataccgtaccgccagtattcagcagcacatttttgccagccgggttcagttcatcgacatgaatagcttcattgccataaggcaccagagacagtttagtgatctcccagcaggatcgtgtcagcggtaaggtaaaaatcagcacaatactgaccagagtcgccaacagccagcccagagtggtggcaaatccgccaagcacaaagttcagaatgttcaaaacggtacgcataaaacctcgctttactgtggttttcagtaatgggcggcaattgtaacgtttttttgggctggagcacgttttctctgacggttacactgataagaaataatttcgtgtggatctacagagtcatggaactgaaagcgacaacgcttggaaaacgtctggcacagcacccttacgatcgggcggtgatcctcaatgccgggattaaagtctccggcgatcgccacgaataccttattcctttcaatcaattactggcgattcactgtaagcgcggtctggtatggggcgagctggaatttgtactgccggacgaaaaagtggtgcgtctgcacggcaccgaatggggcgagacgcagcgtttttaccatcatcttgatgctcactggcggcggtggagtggcgagatgagcgaaattgcgtctggtgttttacgccagcaactggatttgattgccacgcgcactggggaaaataaatggctgacgcgtgagcaaacctctggcgtgcagcaacaaatccgccaggctttgagcgcgttgccgttgccggttaaccgactggaagaattcgataactgccgtgaggcgtggcgtaaatgtcaggcctggttgaaagatattgaaagcgctcggttgcagcataaccaggcgtataccgaagccatgcttaccgagtatgcggattttttccgccaggtcgagtctagtccgctgaatccggcgcaggcccgggcagtcgttaatggcgagcattctctgttagtgctggcaggtgcaggaagcggaaaaacgagcgtgctggtggcccgtgcaggctggttgctggcgcgtggtgaagcgtcccctgagcaaattttattgctggcgtttggtcgcaaagccgctgaagagatggacgagcggattcgcgaacggctacataccgaagacattaccgcacgcacgtttcatgcgctggcgctgcatattattcagcagggcagcaaaaaagttccgatagtcagcaaactggaaaatgataccgctgcccgtcatgaactctttattgctgagtggcgcaagcaatgcagcgaaaagaaagcgcaggcgaagggctggcggcaatggctgacggaagaaatgcagtggagtgtgccagaaggtaacttctgggatgatgaaaaattacagcgtcgccttgcctctcgcctcgatcgctgggtaagtctgatgcggatgcacggtggtgcacaggcagaaatgattgccagtgcacccgaagagattcgcgatctgttcagtaaacgtatcaagttgatggccccgttattaaaagcctggaaaggtgcgctgaaggcagaaaacgctgtcgattttagcggccttattcatcaggcgattgtgattctggagaaaggtcgctttatcagcccgtggaagcatattctggttgatgaatttcaggatatcagcccgcagcgggcagcgttgttagcggcattacgcaagcaaaacagtcagacgacgttgttcgctgttggtgatgactggcaggcgatttaccgattcagcggtgcgcaaatgagcctcaccaccgctttccatgaaaactttggtgaaggcgaacgctgtgatttagacacgacttaccgttttaacagtcgtatcggtgaggtggcaaaccggtttattcagcagaacccaggccagctgaaaaagccgctaaacagcttaaccaatggagacaaaaaagccgtcacgttattggatgagagtcaacttgacgctttgctggataagctctctggttatgccaaaccggaagagcgcattctgatcctggcgcgttaccatcacatgaggcctgccagcctggaaaaagcggcaacacgctggccgaagttgcaaatcgactttatgaccattcatgccagcaaagggcaacaggcggattacgtcatcatcgttggcttgcaggagggaagtgatggttttccggctgcggcgcgggagagcattatggaagaggcgctactgccaccggttgaggatttcccggacgctgaagaacggcggttaatgtacgtggcgctgacccgggcacgccatcgggtatgggcactgtttaacaaagagaatccctctccctttgtggaaatactgaaaaatctggatgtgccggtggcgagaaaaccgtaagaaacaggtggcgtttgccacctgtgcaatattacttcagacggtccgcgagataacgctgataatcggggatcagaatatcgaccgcgtcgttgaaatgcgggctctggattatgaagtctgccgttgccacgttggtggcgaccggaatgttccataccgtcgccagacgcagcaaggctttcacgtcaggatcgtgcggcacggcatttagtggatcccagaagaaaatcaatacatcaattttcccttcactgatcaatgcgccaacctgctggtcaccccccattgggccactcaacatcgcgttgacgttcatgccggtcgcgcgggaaattaagttaccggtagtgcctgttgcatacagtacgtgttgttccagtaacggttgatgccgttccacccagctcatcagcatttgtttgcagtgatcgtgtgccaccagcgcaatatgtttccgcgcaggtaaagtgcgagtcgtcagttccataatgtacatccgtagttaactttcctacagattactgtaagcacttatcgctgcaagataaagaccgaaaaagcctgcgcacaggcacaaaaatctcaggaagatggttgtttttccgcccactgcaggaaagtatttcgcgtttgtgggtcagccagtttaaaccaatacttcagccgttgttctgtgagcacctgagactgcggtggaatagcatccagctcggaaacaccgctaagcagcgtactgtcatctgccatcatcgtggcaaattgcggtagactagcgcgtttcgcggatttgttatagcgttcaacctcgacctcataatcaatcgtttttgccgtactggtaatggcgagaatatccagctttaccggaatcggcgtcgcatcgccatccaacaattcaaggcgcggcgcggcatcaaaatggttagcttcccgctcattctccaggcgaggcaggcgaaaattgacctggttgatgagctgggtattaaaactgaccaccagcggtggggagatatacagccgttcttcactattggaaagatgaatcgtcttctcaacgcgaaacactaactgatgcggtccattatccagttcaatgctgtccgcaccgcgcagcagagagctggaaaccttcttgccgtcgagtaccagaagatcgacatcggtactaagccgcagcgtggtggcaaaaacggataccggcaaacataatgcaatcaaggtggtcacgatgccggttttcataggtagctcctgtcaaaagaccgcccgaataataatgtgtcaaaatttttctttaatcatacttactaacatatagacatatttcccgcttttgctctcattcattcgtattagctgcatggttggcatgtcggctttgtcgtacactttgttaaacagtctggaggaaataatgaaagaaaccgatattgcaggcattttaacgtccactcacaccattgcgctggtgggggcaagcgacaaacccgatcgtcccagctatcgcgtgatgaaatatctactcgaccaggggtatcacgtcattccggttagcccaaaagttgccggcaaaacgctgctgggccagaaggggtatggcacgctggcagacgttccggaaaaagtcgatatggtcgatgttttccgtaatagtgaagcggcgtggggcgtggcacaggaagctattgccattggcgcgaaaactctctggatgcaactgggggtgattaatgagcaagcggcagtactggcacgggatgccgggttaaatgtggtgatggatcgctgcccggctattgagatccctcgcctgggcctggccaaataaaaaatccccggaaggcaaaaaccttccggggatttgttcagggattagttacgcagacgcggggcctggagttgtttgcggatggtctgcgccagctcatccatggatggctgttcaggatgttcatcctgcaattcgctacttagctgggcttcagccaggtaggtatgaaccggtaggccgttatcgtcctccatcactacgtgataccacggagcggcgcgaagctcgtcattcaccgccagctcatcagggctcggttcagagaggctataaaccgggtcgatatccacgaccactccgagataacctaacagggaatggcggacctgctggccgataccgaatttgctggcaatcatagtcacctcccgggaaatctttacctttgatataagggtaaaattccacatttcaagttacatgacgcgacaggcaaaccctttcagatatagcccttccggataggtagcgatcaccggatgatcggctgcctgacggaactgctctataaattgtacatcacgaccggcatcaattgcggcatccgcgatgattttctgaaataaatcgctggtcatcagaccggaacaggagaaagtcaggagaataccgccttcattcagcagctgaatcgccagcatgttgatgtctttataaccacgacacgcgcccatcaactggcttttattctcaacaaacttcggcgggtccatcacgataacgtcaaatttttcaccgcgatcgcgataagtacgcagcaatttaaagacatcatcacggacaaactcagccttgctcagatccagtttgttcagctcaacgttctgccgtgcaatatccagcgcttcctgggaggtatcaacgctgacaacctggctgcaaccgcccatcagtgcgcttacggcgaaaccaccggtataggagaaacagttcagcacacgtttattttcaacgtagcggcgggtagccaggcggctatcacgctggtccaggtagtagcccgttttgtgtccgtgctgaatatccaccagcagtttcattccgtgttcttcaatcggcagcagggcaggtggcaactcgccggtgacggggccctgggtcagctccattccttcttttttacgtaccgcgacgtcgctgcgatcgtaaatgctacattccgggtacagcgtttgcagggcactaattaatgccgcgcgctgatattctgccccagcactcagcagttgcagcaccagaaaattaccgaaacgatcgatagtaatacccggcaggccatcagattctccggcgattaaacgatagctgtcgaggccatctttttgcgccagccagtcacgccatttttgtgcttgttgcaaacggcgggaaaaaaaagcaatgtcgatagactcagacgggtcaaacgtccagacgcgcgcccggatttggctagctgggctataagcgccgcgtgctaaccattttccctgatgatcaacaatatcgatggtttcaccgaggctggctttaccttccatgcgggcaacggccccggaaaagacccacggatggcgacgaagtaatgatttttcgcgccctttggctaacactaaacgtacactcataatttacttttctgtcgatgcaaagaaatgggcgtcattgtccggagttttccatggatttgcaacgcgtccattaaggataaggagagcagcaatgagcaaagtctgcataattgcctgggtttacgggcgagttcagggcgtaggatttcgctacaccacacagtacgaagcgaaaagactgggtttaaccgggtacgccaaaaatcttgacgatggcagcgtggaagtggttgcttgcggtgaagaagggcaggtggaaaaattaatgcagtggttaaagagtggcggcccgcgttctgcgcgtgtagaacgggtgctcagcgagccgcatcatcccagcggggaattaaccgattttcgtatccgttaaatacattttaccggttttggcaggccagcaattttggtggcttgcttagccggacctttcggaaacagtcggtataaatagcggctgttacctttttcttcgccaaatttattcgccatcgcttttaccagcatacgaatcgccggagaagtattgaattccagatagaaatcacgcacaaaacgcaccacttcccagtgttccggactcaggctaatcccttcgttctctgcaatcaccacagccagcggctcactccactggctgctttctttgagatagccttcggtatccgtttctatctctttaccttcgaagatcagcataattattactaccttaatcagactggcggcagtgtaacaaaaaacaaagccccgcataaagcgaggctatgaaagtgttagcgggtgagattaatcgcggctagcgaagcccagaatgctcagcaggctgacgaagatgttgtacaggctaacatacaggctaaccgtggcacgaatatagttcgtctcaccgccatgaatgatgttgctggtttcaaacaagatagcgccagaggagatcagaatgaagaccgcgctgatcgccagatgcagagcaggcagctgcaggaagatattcgcaaccataccaatcagcaccaccacaatacccgccatcagcataccgccgaggaagctcatatctttgcgggtggtcagcacatatgcagagcagcagaagaacactaacgccgttccgcccagtgccatagcgattacgtcacccattccggcagacagataggtgttcagaataggtccgaggatataacccagaaaaccggtaaaggcgaatgcggagataatcccggtcggcttattcgccgttttataggtcaggaacatcaaaccatacatacccaccagcgtcagaatcagacccggagatggcagcatcagcaccgtactggcagttgcggtaatcgcgctaaaggccagcgtcaggctcagcagaaaataggtattacgcagcaccttatgggtgctaagcagacttgtacggtcatgactagaactaacaatacgatccattgagtcactctctatgacagatgtaattaattaagcagcataatgataatgcgtaagggcacccagaagttttacccatctttacgcatttgatctggaacaggtttaacagcggattatcaggtcattaagcaaatataacgccctgagaatttcgacaggcaaaagaaaaaggggttagcatttagctaaccccttatcttattggaatgacgcgcactataaacatcccgatgcggcgtgtaaacccctaatttgtttgtttgcctgaaaaacagccaaaagtgcattgatagcgtgaaataacagcagattgatcatttcatcaccatgaattccttctcttttactcgtttagcaaccggctaaacatccccaccgcccggccaaaagaaaaataggtccatttttatcgctaaaagataaatccacacagtttgtattgttttgtgcaaaagtttcactacgctttattaacaatactttctggcgacgtgcgccagtgcagaaggatgagctttcgttttcagcatctcacgtgaagcgatggtttgccttgctacagggacgtcgcttgccgaccataagcgcccggtgtcctgccggtgtcgcaaggaggagagacgtgcgatatgaataacgaggaaacattttaccaggccatgcggcgtcagggcgttacccggcgcagctttctcaaatattgtagtctggctgccacgagcctgggattaggcgcgggaatggcaccaaagattgcctgggcgctggagaacaaaccgcgcattccggtggtatggatccacggtctggaatgcacctgctgtaccgaatcttttatccgctccgctcacccactggcgaaggacgtcatcctttccctgatttccctcgattacgacgatactttgatggctgccgccggaacccaggcggaagaagtctttgaagacatcatcacgcaatacaatggcaaatatatcctcgcagtagaaggtaatccgccgctgggcgagcaggggatgttctgtatcagcagcggtcgaccgtttattgagaaactcaaacgtgccgctgccggagccagcgcgattatcgcctggggaacctgcgcgtcctggggctgcgtgcaggccgcgcgacccaatccgacgcaggcaacgcctatcgacaaagtcatcaccgacaaacccattatcaaagtacctggctgcccgccgatcccggatgtgatgagcgccatcattacttacatggtgacctttgatcgcttgccagatgtcgacagaatgggccgtccgctgatgttctatggtcagcgaatccacgataaatgctatcgccgcgcccacttcgacgccggagagttcgtccagagttgggatgatgacgctgcccgcaaaggttactgcctgtacaaaatgggctgcaaagggcctaccacctataacgcctgttcctccacacgctggaatgatggcgtttctttcccaatccagtctggtcacggctgcctgggctgtgcggaaaatggtttctgggatcgcggtagcttctacagccgcgtggtcgatattccgcaaatgggtactcattccaccgccgataccgtcggtttaaccgcgcttggcgtggtggcagcggctgttggtgtgcacgcagtcgccagcgccgttgaccagcgcagacgtcataaccagcaacctacagaaaccgaacatcagccaggcaatgaggataaacaggcatgagcactcagtacgaaactcagggatacaccatcaataatgccggacgccgcctggtggtcgacccgattacgcgcatcgaaggccacatgcgctgcgaagtgaatattaacgatcagaatgtgatcaccaatgccgtctcctgcggcaccatgtttcgcgggctggagatcatcctacaagggcgcgacccgcgcgatgcgtgggcgttcgttgaacgtatctgcggcgtctgtactggcgtacacgccctggctagcgtttacgccatcgaagatgctatcggtattaaagtgccggacaacgccaatatcatccgcaacattatgctggcaacgctctggtgccacgatcatctggtgcacttctatcagcttgccgggatggactggatcgatgtgttagatgcgctgaaagccgacccgcggaaaacctccgaactggcgcaaagtctctcctcttggccgaaaagttcccctggctatttcttcgacgtacaaaaccgcctgaaaaaatttgttgaaggcgggcagttggggatcttccgcaatggctactgggggcacccgcagtacaaactgccgccagaagctaacctgatgggctttgcccactatctcgaagctctcgatttccagcgtgaaattgtcaaaatccacgcggtctttggcggtaaaaacccgcatccaaactggattgtcggcgggatgccttgcgccatcaacattgacgaaagcggcgcggtcggggcagtcaatatggaacgcctgaacctggtgcagagtattatcacccgcacggcggacttcattaacaacgtgatgatccccgacgccttagccatcggtcagttcaacaaaccgtggagcgaaatcggcactggtctttctgataaatgcgttctcagctacggcgcattcccggatattgccaacgactttggcgagaaaagtctgctgatgcctggcggcgcggtgattaacggcgacttcaacaatgtgctgccagtggatttggttgatccgcagcaggtgcaggagtttgtcgaccacgcctggtatcgatatcccaacgatcaggtcgggcgtcatccgttcgatggcatcaccgacccgtggtacaaccccggcgatgtcaaaggcagcgataccaacattcagcagctgaatgaacaggaacgctacagctggatcaaagcgccacgctggcgcggtaacgcgatggaagtggggccgctggcgcgcacgttaatcgcttatcacaaaggcgatgctgcgaccgttgagagcgtcgatcgcatgatgagcgcgttgaacctgccgctttccggtatccagagtacgttaggccgcattttgtgccgcgcgcacgaagcgcagtgggccgcaggtaagttgcagtatttcttcgacaagctgatgaccaacctgaaaaacggcaatctcgccactgcttccacggaaaaatgggaacctgcaacctggccgacagagtgccgtggtgtcggttttaccgaagcgccgcgcggggcgttaggccactgggccgccattcgcgatggcaagattgatctctaccagtgcgtggtgccgaccacctggaacgccagcccgcgcgatcccaaagggcagattggcgcttatgaagcggcgctgatgaacaccaaaatggcgatccccgagcaaccgctggagatcctgcgtactctgcacagctttgacccgtgcctcgcctgtagtacacacgtgctgggcgacgacggtagcgagctgatctccgtgcaggtgcgttaacagcgaaggagaatcatcatgcaacagaaaagcgacaacgttgtcagccactatgtctttgaagcgccagtgcgcatctggcactggttgacggtgttatgcatggcggtgttgatggtcaccggatactttatcggcaagccgctaccttccgtcagcggcgaggcgacgtatctgttctatatgggctacatcaggttaattcacttcagcgccgggatggtttttaccgtggttttgctgatgcggatctactgggcttttgttggcaatcgatactcccgcgagctgtttatcgtgccggtatggcgtaaaagctggtggcagggcgtgtggtatgaaatccgctggtatctgtttctggcaaaacgtccgagtgccgatataggccataatcccatcgcccaggcggcgatgttcggctatttcctgatgagcgtctttatgatcatcactggttttgcgctgtacagcgaacacagccagtacgctatttttgcgccgttccgttatgtggtggaatttttctactggacgggtggcaacagtatggacattcacagctggcatcggctggggatgtggctgattggcgcgtttgtgatcggtcatgtctacatggcgctgcgtgaagacatcatgtccgacgacacggtgatctccaccatggtcaacggctaccgtagccacaaatttggcaaaataagtaacaaggagcgtagttgagctaaataagtaacaaggagcgttcatgagcgagcaacgcgtggtggtcatggggctgggcaacctgctgtgggccgatgaaggcttcggcgtgcgggtggcggaacggctgtatgcccattaccactggcccgagtatgtggagattgtcgatggcggtactcagggactgaacttgctggggtatgtcgaaagcgccagccatctgttgattctcgatgccattgactacgggctggaacctggaacgctgcgaacctatgccggagaacgcattccggcttatctcagcgcgaagaaaatgagcctgcatcagaacagtttctccgaagtgttggcgctggcggatatccgcggacatctgccagcacatattgccctcgtcggtctgcaacccgcaatgctcgacgactacggcggtagcctgagcgaactggcacgggagcaactgcccgctgcggaacaggcggcgctggcgcagcttgctgcgtggggaattgtgccgcaaccggctaatgaaagccgctgtctcaattatgactgtctgagcatggaaaattacgaaggcgttcgcttgcgccagtaccggatgacacaggaggagcagggatgagcaacgacacgccatttgatgcgttgtggcaacgaatgctggcgcgcggctggacgccagtcagtgaatcccgtcttgacgactggcttacgcaagcgccagacggcgtggtgttattaagcagtgacccgaaacgcacgccagaggtcagcgataatccggtaatgattggcgaattactgcgcgagtttcccgactatacatggcaggtggcgattgctgaccttgagcagagcgaagccatcggcgatcgctttggcgtctttcgctttcctgccactttagtgtttaccggcggaaactatcgcggcgtgctgaatggtattcacccgtgggcggaactgataaacctgatgcgcgggcttgtcgaaccgcagcaggagcgtgccagttgatctaaccgcagcaggagcgtgcctcatgagcgaaacttttttccatctgctggggccaggaacgcaaccgaacgatgacagtttcagcatgaatccactgccgatcacctgtcaggtgaatgatgaaccgagtatggcggccctggagcaatgtgctcacagcccgcaggtgattgcgctgttaaacgagttacaacatcaactaagcgaacgccaaccgccgttgggcgaggtgctggcagtcgatctgttaaatctcaacgccgacgatcgtcactttatcaatacgcttctcggggaaggggaagtgagtgtgcgcattcagcaggctgacgacagtgaaagtgaaatacaggaggcgatcttctgcggattatggcgggtgcgcagacgtcgcggcgaaaagttgctggaggacaaactggaggctggctgcgcgccgctggcgttgtggcaggcggcaacgcaaaatctcttgccgacagatagcctgttaccgccgcccattgatggcctgatgaatggcctaccgttggcgcatgagttactggcacatgtacgtaaccccgacgcgcagccgcacagcattaatctgacgcaattacccatcagcgaggctgatcggctttttctcagtcgtctctgtgggccgggaaatattcagattcgtaccattggctatggcgagagctatatcaacgccacggggttacgccatgtctggcatttacgctgtacggacaccttaaaaggcccgttactggaaagttatgaaatctgcccaataccggaagtggtgctggcagcgccagaagatttggtcgactctgcgcagcggcttagcgaggtatgtcagtggctggcggaagctgcaccgacgtaaaaagacggtaagtatcgctttcagtcttatgaatatcgcaatcggcgaatacctctggtcgtagagtttcaggataaagagggagatctaccattatcgggttatttttctctcttcgcctacaggagtgcgcatgtgggatgtcattgatttaagccgctggcagtttgctctgaccgcgctgtatcactttttatttgtaccccttaccctggggctgatttttttgctggctattatggaaaccatttacgtggtcaccggcaaaacaatctaccgcgatatgacgcgcttctggggtaagctcttcggtatcaattttgctcttggcgtggctaccggcctgaccatggagtttcagtttggtactaactggagtttctattccaactatgtgggcgatatttttggcgcaccgctggcgatggaagcattaatggccttcttcctcgaatccacctttgtcgggctgttcttcttcggctggcaacggctgaataaataccagcacctgctggtgacgtggctggtggcgttcggtagtaatctctctgcgttgtggatattgaatgccaacggttggatgcaatacccgaccggtgcgcattttgatatcgacaccctgcgtatggagatgaccagcttcagcgagctggtctttaatccggtcagccaggtgaaatttgtgcacaccgtaatggcgggctacgtgaccggggccatgtttattatggcgatcagcgcctggtatttactgcgcggacgggagcgcaatgtcgcattacgcagctttgccatcggttccgtcttcggtactctggcgattatcggtaccctgcaactcggagacagttctgcgtatgaagtcgcgcaagtacaaccggtaaaactggcggcgatggaaggggagtggcaaacggaacctgcacctgcaccgttccatgtggttgcctggccggaacaggatcaagagcgtaacgcctttgccctcaaaattcccgcgctgctagggatcctcgccactcacagtttagataaacccgtgccgggtctgaagaatttgatggctgaaacctacccacgcttgcaacgcggacgtatggcctggctgttaatgcaggaaataagccaaggcaatcgtgagccgcatgtgttgcaggcattccggggactggaaggtgacctgggctacggcatgttgctctcccgctatgcgccggatatgaatcatgtcacagccgcacagtaccaggcggcgatgcgtggcgcgatacctcaggttgcgccggtattctggagtttccgcatcatggtgggctgtggttccctgctgctactggtgatgctgattgcgcttgtccagacgctgcgtggcaaaatcgaccagcatcgctgggtgctgaaaatggcgctctggagtttgccgttgccgtggattgcgattgaagccgggtggtttatgaccgagtttggtcgtcagccgtgggcgatacaggacatcttaccgacatactccgcgcactccgctttaaccacaggacaactggctttcagtctgatcatgatcgtagggctttacaccctgttcttaatcgccgaagtctacctgatgcagaaatatgcccgtctggggccgagcgcgatgcagagtgaacaaccgacgcagcaacaggggtaaaggagaaaatcatgtttgattatgaaacattgcgcttcatctggtggctgctgattggcgtgatcctggtggtctttatgatctccgacggatttgacatggggatcggctgtctgctgccgctggtggcgcgtaatgatgatgaacgccggatagtgataaacagcgttggtgcacactgggaaggcaaccaggtctggttgatcctcgctggtggggcattatttgccgcctggcccagagtgtatgcagcggcgttttccggcttttatgtggcgatgatcctggtgctgtgcagtctgttcttccgcccgctggcctttgattatcgcggaaaaatcgccgatgcacgctggcgtaaaatgtgggacgccggtctggtcatcggcagtctggtgccgccggtagtcttcggtatcgccttcggcaacttgttgctcggcgtgccgtttgccttcacaccgcaattacgcgtggagtatctcggcagcttctggcaactgctgacgccattccctttattgtgcggattgctcagccttgggatggtgattttgcaaggtggcgtctggttacaactgaaaactgttggtgtgattcatctgcgtagtcagctggcgaccaaacgcgctgcactgttggtgatgctgtgctttttgctggcgggttactggctgtgggtcggtattgatggctttgtactgctcgcccaggatgctaacggtccttccaatccgttaatgaaactggtggcagtgctacctggtgcctggatgaataattttgtcgagagccccgttttgtggatcttcccgctgctgggattcttctgcccattgctgacggtgatggcgatttatcgtggtcgcccgggttggggatttttgatggcaagtttgatgcaatttggcgtgattttcacggcaggcatcacgctgttcccctttgtcatgccgagtagcgtgagtccgatctccagcctgacgttgtgggacagtacttccagtcagctgacgctgagcattatgttggtaatcgtgctgatatttttgcccattgtgttgctctacactctctggagctactacaaaatgtgggggcgcatgacaacagaaactctccgccgtaacgaaaacgagttgtactaaggagcagaaacaatgtggtatttactttggttcgtcggcattttgttgatgtgttcgctctccacccttgtgttggtatggctggacccgcgtctgaaaagttaacgaacgtaggcctgatgcggcgcattagcatcgcatcaggcaatcaataatgtcagatatgaaaagcggaaacatatcgatgaaagcgatcttaatcccatttttatctcttctgattccgttaaccccgcaatctgcattcgctcagagtgagccggagctgaagctggaaagtgtggtgattgtcagtcgtcatggtgtgcgtgctccaaccaaggccacgcaactgatgcaggatgtcaccccagacgcatggccaacctggccggtaaaactgggttggctgacaccgcgcggtggtgagctaatcgcctatctcggacattaccaacgccagcgtctggtagccgacggattgctggcgaaaaagggctgcccgcagtctggtcaggtcgcgattattgctgatgtcgacgagcgtacccgtaaaacaggcgaagccttcgccgccgggctggcacctgactgtgcaataaccgtacatacccaggcagatacgtccagtcccgatccgttatttaatcctctaaaaactggcgtttgccaactggataacgcgaacgtgactgacgcgatcctcagcagggcaggagggagtattgctgactttaccgggcatcggcaaacggcgtttcgcgaactggaacgggtgcttaattttccgcaaagtaacttgtgccttaaacgtgagaaacaggacgaaagctgtagtttaacgcaggcattaccaagcgaactcaaggtgagcgccgacaatgtcagtttaaccggtgcggtaagcctcgcaagtatgctgacggagatatttctcctgcaacaagcacagggaatgccggagccggggtggggaaggatcaccgatagtcaccagtggaacaccttgctaagtttgcataacgcgcaattttatttgctacaacgcacgccagaggttgcccgcagccgcgccaccccgttattagatttgatcaagacagcgttgacgccccatccaccgcaaaaacaggcgtatggtgtgacattacccactagtgtgctgtttatcgccggacacgatactaatctggcaaatctcggcggcgcactggagctcaactggacgcttcccggtcagccggataacacgccgccaggtggtgaactggtgtttgaacgctggcgtcggctaagcgataacagccagtggattcaggttagcctggtcttccagactttacagcagatgcgtgataaaacgccgctgagtttaaatacgccgcccggagaggtgaaactgaccctggcaggatgtgaagagcgaaatgcgcagggcatgtgtagcttggcaggttttacgcaaatcgtgaatgaagcacgcataccggcgtgcagtttgtaatgcataaaaaagagcattcagttacctgaatgctctgaggctgatgacaaacgaagaactgtctaatgcgtagaccggaaaaggcgttcacgccgcatccggccactttcagtttgcaatacgtacgcttgagatcaggattgtctactttgagtataacatccttgtgaaatctccctttcctcataccgcttgcactatatactgcgggtaggaaaggcgcgcagagggaaatataagattgttaactatccccctctggaaatacgacttgtgagcataagataaatcttagcaaaatacaaattaaagataaggaaattgttacgaaagctattaattattgttggtaatatagtttcaagtggtactataactggctgttaaatggcatttataactattaggtgcagagatattcgcttaaatggattagtttctttgtggaaaagtaactgatgttataatgtatgatgttgactatttcactattccaataaaaccagtcagctttaaacaagcagcgtcatattaagagagataaacatttgccgctgttggtcctcgcaggccatttacgcggcaaaattccacacgtaatcctggtataagcacttctgcgtcgcggggagtgaatgcggaaatatggacctgaacttctttacgaccgtcggaggggataatgaatcctttgccgcttttgcgatcaaaggttttgacaattcctgtcattttacgggacaaacaaattccttactgaaaatactgcgctgcactatacggggttaataaaataaagccagcgatatttaagaccgccggacggctaaaataaaatttgcttaatctcaattatcatgcgttaatagctgcgtcggtttgaaagacagacagcatacaaagtagtttactaaagcagttctcattatcaggcattatccccttcttttgagtctctctcctgaacactaagtagtttctgtattaaagccctgtttgccgaaaggcccaaaatgaaggaagtaaaatatgtctaataaaatgactggtttagtaaaatggtttaacgcagataaaggttttggctttatcactcctgatgatggcagcaaagacgttttcgtccatttcaccgccatccagagcaatgaattccgcacgctgaacgaaaatcagaaagttgaattttctattgagcaggggcaacgtggccccgcggcagcgaacgttgttacgctctaaggttgccattattactcaacatctccatttccgctgtccatgttgtcatggttcacagtaccgcacatcggcattcgatgtgacggagcgaaaccctttgggcgctaagtgtattttttgtaaatcgacgatgatcacctttgataacgtcgcgctgcaaatacgcactgaccatgcgccgctggattagtcaaaataatatcaggctccctcgtggagccttttttatatctgccttatttttcttcaacgctgtatgtatagtaagcgataacctgttgattattgaatctttcggggagatggcttataacatttcttacctgaccagggtaccgggaaccaacaccttactggcgtgttgctgtcttttaagaccagaagaggttaacagtgaatattgaagagttaaaaaaacaagccgaaacggaaatcgccgactttatcgcgcaaaaaatcgccgagctgaacaagaatacagggaaagaagtctctgaaattcgcttcaccgcacgagaaaaaatgaccgggcttgaaagttatgatgtcaaaatcaaaataatgtgattttgtgaacatcaccccgtgcgaggtgatgttccgcttgttgctaatttagtgaccaatcattggcgcttgtggaattaagcgtcggtacaattcctccggcaccgggctttgccatactcccgcatacattgcgtaaccaatcaccgcaaacataatccccagaaccagtagcgtcattaaccagccagacaacgcaaaggcttttttatttgccgcaggtttttgcagactaaaggtcaatgtactggctaccggacaactctctacgcaagtcatacagccggtacattccactgttcgtacctgaattaatttatcgaccgggatccgacttgggcaattttttgcgcatttgccacagtcgatacaactttcggcattgcgacgaatcttaaacgggctcaataggctaaccacgcccatcagcgcgccatatgggcaaagataacgacaccaggcatggcgaataaacaggctggcaatcagcaaaacggtcacgctgattaatgtcgcggtccccatatgacgaaagaaatcgagcattttaacgtccatcaccacgctgtaggggctcaacataaaatagtgaatcgcctgagcgggcatcaataacgcgatatagataaaaaaactcaacagcaaatacttcacgccgcgcagaggaatatccagccagcggggaaggacacattgccgaccaaacagtttgttaccgagatcgccgattaattcagaaagcgtaccaaccgggcataaccaactgcaaaaggcctttttgagtaatagactgatgacgataaaagcgaccaataacagcatcgcggcggcgtggacggacggtaactgacctgttacaaggctatatttcagattcatcagcccggcaatcggtagccagccttcgatacctcccggtctggcgacaaatgtcgtgctacttgccgtttcgtaatagcgcacccaataccagaacgtgatggcaatataaatattcattgccaacagtaataattgcgtcgctttacgccaggtcgtggcattacgccagtcattccacggtaatttgccgcccgtcgtgcctggccgccgctgccagcgggttcttttattctctgccatgattttgccagtccgttaagttgtataccaaatgccactattctagttgttcttaactggctgatattgattcaaatcgcgttcaggtctttcttatgcaaccatgcttccagagcggcaacactgcgtgtaatttcttcgtgtggaaggggggcagataatggctgctgctccagttgtgcgcatagctggctggcgatatgcattcccagactgctgcaactgctttttagctgatgcgcggcacgctttattttctcgctatcctgactggcgcgggcaatgtcgatttcatcgagaagcggcagggcatgttgtgtaaataataccagccattcgtggatcttctccgtccccattaactgagcatcttcattgagttggcttacatccaggctttgatcattattgacttgcagttggagatagtgcgccagtaactgaccgagcacttcacgcggcaccggtttagggataatcccgcggaataaactactggtacgctggcgcagcgtttcgtcaatgacatgggcgctaaagccaatcaaaaccaggctcggatattgctgtgccagttgtcgggcaagcgtaatgccgtcgatatccggcagatcaaaatccaccagtgcggcagcaaacggttcgctattttgcagtgtctctaaagcctgcgcggcattgccaacagcaacaatctgcgcaccactggttttcagcatctcaatggtaattcgctgggttagcgggttatcttcaattaacagcaaacgtaaaccgtcaagacgcaccgcctgattgactgtttttggcacgggtgccgtggcaacacgtaacggcaagcgtaaacaaaaacagcttccaacctccggcgtgctggtggcgctcagttcgccgcccatcgcctgggccagacggctactgatagtcagtcccagcccggtgccgccgcgtttgccgcttacctgcacaaatggctggaagatttctgccagtttcgcgggatcaataccgcagccgctgtcttccacttcgaccagccattgctcgccatcagtgcgactacgcaggataatgtacccttcgtcagtaaaacgcagggcgttgctcaacaggttggttataacctgacgaatacgtcgtggatcgcccattaacgcgcacggcatatcatcggcaattgccgttgccaggcgaatcgggcgacctttcacccgtccgctcattaattgcagggtactttccagcagcgggcgcggttcaaagggctcatcgctgacgctaacattcttgccacctgcttcgatagcggaataatcgagaatatcgttgaggatggtcagcaagctttcaccagagtcagtaattgcccgcaaatcatcacgctgggcgttaagtgcggggttatctgccagcagttgagcagtgccgagaataccgtacagcggtgtgcggatctcatggctcatcgccgccagaaacgcgctttttgcctggctggctttttctgcttccgcccgtgcctgtcggtgttctatcaccagttcctgcaattcagctgtacgcgctttgacctgcgccgccagctgttcgcggtggcgattcagtgcatgaacattgctgcgaaacgcatccatcagccgcccgatggtatccagctcccgtacgccagcggtttccgggaaaggggagtcaatatcaccgtccagcagccgttgcagcgcctgcgtttgttcggcaagtggacgcgtgacactgcgataaaccacgcgccagaggatcagaatcagtgcgcaaagactaaccatccccagcaataacaggctgtattgcccgcgtgcactcgctttttccagatgcgccagtccgtgctgattacgcagctcaatggtgtcgaccagctgactgacttcgctactaaactgcgcgaactgggcgatgttattttgtgcgagagtttgtaggtgattgctgatttcactgtcctgctgatacagcgccagcaaatcgctatattggctaacggtagttaacgttgttgcgacctgcgcacgaacacccggatcttcaatgcgtatttgccgacgttgcagaattttcaccgcattattgagctgcttttccagcgttggtgcatttttctggatctgctccagccccagattcatcaccatttgctgcacccgcagagcgctaaggcgcagttcattcatctggttaacatactcaagatcgatatcaatcagccgatcgagtgcactttcagcagcctgacgctgatcttgttcgatcaaatcgtaaatcccggcctgggtcgctccagcggaagttgtcgcattattcgcctgaccttgcgccaggcgtgcgatctcatcggcggcagcgactatctgctgactgagttgctgttgttgctggcgcagttgcaaacgctgccccaccagttccccttgctgacgtaagctacgggagatctcctgctcctgttgttcaatagcggtggtatcaaaaccttgttcccgtaacgcttgcagcaacgcattaatcttcaggctttgtgcggtgagcattcgcccctgcgcctgccacatcttttcgttatcggcactggtcaggttctgcgcggcgaaaagttcccaggcgctggcttcgctcaactggcgcgccatattcatggtaggaatcaatgcctgagtgttgtctttttccacctggctgataaagcgcaggttgtaccatcccaccagggtactggtcagggttaacagcgccatcagggcaaagcccatccagagtcttcgggtcagggttaaattcacggtcggtgcactttaggtgaaaaaggttgagtcgcaaagcggaatgcatctagcataaagccttattattgatgaggctatcatgcgcgtactgctatttttacttctttcccttttcatgttgccggcatttagcgctgataacctgttgcgctggcatgatgcgcagcatttcacggtgcaagcctctacgccgcttaaagccaaacgcgcatggaaactgtgcgcgctttatcccagcctgaaagatagttattggttaagcttgaactatggtatgcaggaggctgctcgccgctacggtgtggatttaaaagtgctggaggcaggcggctacagccagttggctacccagcaagcacaaatcgaccagtgtaaacagtggggcgcagaggccattttgctcggtagtagcacgaccagttttcccgacctgcaaaagcaggtagcaagtctgccggtgatcgaactggtaaatgctattgatgctccccaggtgaaaagccgcgttggtgtgccctggtttcagatgggctatcaaccggggcgatatctggtgcaatgggcgcacggtaaaccactgaatgtgctgttgatgcccggacccgataacgccgggggcagtaaggagatggtcgagggttttcgcgcagccattgccggaagcccggtgcgtattgttgatattgcgcttggtgataacgatattgaaatccagcgtaacctgttgcaggagatgctggaacgccatccagaaatcgacgtcgttgccggaacggccattgcggcagaggcggcaatgggggaagggcgtaacctgaaaacgccgcttaccgtggtgagcttttatcttagtcatcaggtgtatcgcgggctgaagcggggaagagtgattatggctgccagcgatcaaatggtctggcagggggaactggcggttgagcaggccatcaggcaattacaggggcaaagcgtttctgataatgtcagcccaccgattttagttctgacgccgaaaaatgccgaccgtgaacatattcgccgcagcctgagtccagggggatttcgtccggtctatttttatcagcacacaagtgcggctaagaaataatcagcacacatcagcggctaagaaataaccttcaccatgttgcgtcaccagtaaatccgcgctgagtttatgacgtaaacgacgaattaacacatcgacggtgcgcaggtcagggttttccacccgacgcgcagaaagcatacgtagcagacgttcacggctgagaatttcgcccggattcgtcacaaatgccaccaacatttcatactctgcgcgggtcagtttaatcggctcgccatcccgctccagcgtatggcggctcacattcaggcaataaccggcaaagcgatagcagttgtcctgagtgtgcggttgagcttgtcgcgcgaggtcgattcgccagagcagatttttcacccgtactaccagttcgcgcagttccagcggtttggtgacgtaatcgtctgcgcccatttccagcccaacaatacggtcaatccgatcgctgcgtccggtaaccagaataatccccaccgtactgcgttctcgcagggcgcgggttaacatcaggccattttcatcgggtaagttgatatccagcagaattaaatctacgctctgattctgcataatttcccgtagcccagcaccgctcgccgtaacggaaacggtatacccctcctgagtgaagtaggattgtaatcgcgcctgggtaaccggctcatcttcaacaataacaatgtgatgtggcatcagagggttttactcattctgttcatatctgttcatattctgccgtaagccgttcatcctgaccagtgccgctgttcatatttgctcattaagatcgcttcactaaaccataattctacaggggttattatgcggaaactctggaacgcgctacgccgacccagtgctcgttggagcgtactggcgctggtcgcaattgggattgtgattggcattgcgctgattgtattgccacacgttgggatcaaagtcaccagcacaaccgaattttgtgtcagttgccacagtatgcaaccggtgtatgaagaatataaacagagcgtgcatttccagaacgcctccggcgtgcgagctgaatgccatgactgtcatatcccgccggatattccaggcatggtgaagcgcaaactggaagcgagcaatgatatctaccagacctttattgctcactccattgatacacctgaaaaattcgaagccaaacgcgcggaacttgccgagcgtgaatgggcgcgaatgaaagaaaacaacagcgcaacctgccgctcctgccataactacgatgcgatggatcatgcgaagcagcatcctgaagcagcacgtcagatgaaggtggcagcgaaagataatcaatcctgcatcgactgtcataaaggtattgcccaccagttaccggatatgagtagcggcttccgtaagcagttcgatgagctgcgcgccagtgctaatgacagtggtgacacgctgtactctattgatattaagccaatttatgcggcgaaaggcgataaagaagcctctggttctctgctgcctgctagcgaagtgaaagtccttaaacgtgacggcgactggctgcaaattgaaattaccggctggacggaaagcgccggacgtcagcgtgtactcacccaattcccaggtaaacgcatctttgttgccagcattcgtggtgatgtgcagcagcaggtaaaaacgctggagaaaaccaccgttgccgacaccaataccgagtggagcaagttgcaggccactgcgtggatgaagaaaggcgacatggtgaacgatatcaaaccgatctgggcttatgcggatagcttgtacaacggcacctgtaaccagtgccacggcgcaccggaaatcgcccactttgacgctaacggttggatcggcacgctcaacggcatgattggctttaccagtctcgataaacgtgaagaacgcaccttgttgaaatatctgcaaatgaatgcgtctgacaccgcaggtaaggctcacggcgataagaaggaagaaaaataatgaacaataacgatctctttcaggcaagtcgtcggcgttttctggcacaactcggcggcttaaccgtcgccgggatgctggggccgagtttgttaacgccgcgacgtgcgactgcggcgcaagcggcgactgacgctgtcatcagcaaagagggcattcttaccgggagccactggggggctatccgcgcgacggtgaaggatggtcgctttgtggcggcaaaaccgttcgaactggataaatatccgagcaaaatgattgccggattgccggatcacgtacacaacgcggcgcgtattcgttatccgatggtacgcgtggactggctgcgtaagcgccatctcagcgatacctcccagcgcggtgataaccgttttgtgcgcgtgagctgggatgaagccctcgacatgttctatgaagaactggaacgcgtgcagaaaactcacgggccgagtgccttgctgaccgccagtggttggcaaagcacggggatgttccataacgctagcgggatgctggcgaaagctattgccttgcatggtaatagcgttggtacgggcggagattactctaccggtgctgcgcaggtgatcctgccgcgcgtagtcggtagcatggaagtgtatgaacagcaaacctcctggccgctggtattgcagaacagcaaaaccattgtgctgtggggctccgatttgctgaaaaaccagcaagcgaactggtggtgcccggatcacgatgtttatgaatattacgcgcagctaaaagcgaaagtcgccgccggtgaaattgaggtcatcagcatcgatccggttgtcacatccacccatgagtatctggggcgcgagcatgtgaagcacattgcggttaacccgcaaactgacgtgccgctgcaactggcgctggcacatacgctgtacagtgaaaacctgtacgacaaaaacttccttgctaactactgtgtgggttttgagcagttcctgccgtatctgctgggtgagaaagacggtcagccgaaagatgccgcatgggctgaaaaactgaccggcattgatgccgaaaccattcgtgggctggcgcggcagatggcggcgaacagaacgcaaattattgctggctggtgcgtgcagcgtatgcagcacggtgaacagtgggcgtggatgattgtggttctggcggcgatgctggggcaaattggcctgccaggtggtggttttggttttggctggcactacaacggcgcaggcacgccggggcgtaaaggcgttattctgagtggtttctccggctctacgagcattccgcctgttcacgacaacagtgactacaaaggctacagcagcactattccgattgcccgttttatcgatgcgatcctcgaaccggggaaagtgatcaactggaacggtaaaagcgtaaaactgccgccgctgaaaatgtgtatttttgccggaactaacccattccatcgccatcagcagatcaaccgcattattgaaggcttgcgcaagctggaaacggttatcgccatagataaccagtggaccagtacctgccgctttgccgatatcgtactgcctgcgaccacgcagtttgagcgtaacgatctcgaccagtacggcaatcactccaaccgtggcattatcgccatgaaacaggtggtgccgccgcagttcgaggcgcgcaacgacttcgatattttccgcgagctgtgccgtcgctttaatcgcgaagaagcctttaccgaagggctggacgaaatgggctggctgaaacgcatctggcaggaaggtgtacagcaaggcaaaggacgcggcgttcatctgccagcgtttgatgacttctggaataacaaagagtacgtcgagtttgaccatccgcagatgtttgttcgccaccaggcattccgcgaagatccggatctcgaaccgctgggcacgccgagtggcctgattgagatctacagcaaaactatcgccgatatgaactacgacgattgtcaggggcatccgatgtggtttgagaaaatcgaacgctcccacggtgggcctggcagccaaaagtatccgttgcatctgcaatctgtgcatccggatttccgacttcacagccagttatgtgagagcgaaacgctgcgtcagcaatatacggtagcgggtaaagagccagtattcattaacccgcaggatgccagcgcgcgcggtattcgtaacggtgatgtggtacgcgtctttaacgctcgcggtcaggtgttggcaggggcagtggtttctgaccgctatgcacccggcgtggcacgaattcacgaaggggcatggtacgatccagataaaggcggcgagcctggtgcgctgtgcaaatacggtaaccccaacgtgttgaccatcgacatcggtacaagccagctggcgcaggcgaccagtgcgcacactacgctggtggaaattgagaagtacaacggaacagtggagcaggtgacggcgtttaacggccccgtggagatggtggcgcagtgcgaatatgttcccgcgagccaggtgaaaagttgaattaacccgcgtcgcaggtgaaatcatgaccacgctgacagcacaacagattgcctgtgtttacgcctggctagcgcagttgttctcccgtgagctggacgatgaacaactgacgcaaatcgccagtgcgcagatggctgaatggtttagcttgctgaaaagcgaaccgccgctcactgcggcggtgaacgagctggaaaaccgtattgccacgctgacagtacgtgacgatgcccgtctggaactggccgcggacttttgcggcctgtttctgatgaccgacaaacaagcggcgctgccgtatgcaagcgcctacaaacaggacgagcaagagattaaacgcttgttagttgaggcagggatggaaaccagcggcaatttcaacgaaccggcagatcatctggcgatctatctcgaattgctcagccatctgcattttagcctgggagaggggaccgttcctgcgcgaagaatcgacagtttgcggcaaaaaacactgacggcgctgtggcaatggttaccagagtttgttgcgcgttgtcgtcagtatgacagctttggtttttacgcggcactaagccagttattgctggtgttagtggagtgcgaccaccaaaacagataacgtcgtttgtgcgcctgaaaagacgcgtttagcgtcgcatcaggcattatggcgcagttgccggatgcggcgtgaacgtcttatccggcccacaggaactgtaatctttgtagaccggttaagatgcgtcatcgcatccggcaaacacacatcacggatgagctacaaaccgggaaagccgctggcgcagcaggcggttttcctgcttcaggtgcgcaatatcatccattaacgtcagcgccaccgcgatccccggccagtccagagccagttcatgacgcaggcgtaccgcgcgttgcaccacaatggcggcatggtcgtcaaatacccaggttgtttcctggatctcacgcggttcaaccacccccaaaccgacaatttcattcaactcctcttcagagatgccggtatgcaggcaaaattcggtaatagtaaaagtcaccgtaacattagccattatgctttcccccaatctttacgtggatcaaaagagctctgggcgtctgccagttgctgccacagcgcggcagtgttttcatccggtttcggcggcatcacgattttcagtaccgcatacagatcgccggtctgttttttgctcaccagacctttgcctttaacgcgcaatcgttgcccggcctggctgcctggcgggatagtcagcaaaatgctttctttcagtgttggaacggtgactttagcacccagcgccgcttcccacgggctaaccggcaccacaatttccagatcctggccgacaatatcaaacagcggatgtggcgcaatatgaatcaccagccacaaatcgccatttggaccgccgttttcgcccggcgtcccctggcctttcagacggatgcgttgaccattgccgacgcccgccgggatcttcacattcagcgttttcggaatttcctgttcgatcatgccaaaggcgttataaaccggcaggttatagctgatggtacgcttatgctcagtaagcgtttcttcgaggaataccgccacttcgatttcaatatcgtggccgcgtgtggcggggcgttgacggctctggcgggcatgctgaccgaaaatactgctgaagatatcgtcaaaatcttcggcgttaaaactctgaccgtcgccatggtggaactgacggttaaattgcggatcgttgcgatgttgccacatctgatcatactcagcgcgacgttgttcatcacttaacacttcccaggcttcagcgacctctttgaagcgggcttcggcatccggttctttgctgacatcaggatggtatttgcgggcaagtcgacgataggcggtcttgattgtcttgagatcgtccgtcggtttcacgcccatgatggcgtaataatcctttaattccatagcgttatctcgcgtaaatcaacacaaattgaaggaacccctgtaaggtaactcctataagtgtagggtaatcctcaaaatttcatatgccaacacagaatatgttattgaaatcatcgcggagaggaggtcgccatcaagatgggttgctgaacatattttaaacaggtgaaaaagggtgagcgatttttgatagttgaaccaggcactttaagtttaactagggcgtcattatttattaaattttatagacgctatatatgggtagtaatatacatggaattagttgcactgcaaataattatttgaaacaggcctggaacgatataaaaaatgagtacgaaaaaaatcaaacatatagtatcacgctttttgaaaacacactggtgtgttttatgcggttatacaatgaactcagacgtaaagtaaatgaagaggatactccatgtctggaatgtgaaagtctagaaaaagaatttgaggaaatgcagaatgataatgatctaagtttatttatgagaatattgcgtactaatgatacacaaatttatagtggggttagtggaggtattacatatactatacaatatgttcgagatattgatattgttagagtgtccttgccgggcagagctagtgagtctatcacagattttaaaggttattattggtataactttatggagtatattgaaaacattaatgcgtgtgatgatgttttttctgagtattgttttgatgatgaaaatataagtgtccagccagagcggataaatacgccgggaatatctgatttggattctgacattgatttgtctggtatatcttttattcagcgtgaaactaaccaggcattaggattaaaatatgctcctgtagatggcgatggatattgtctgttaagagctatactggttttaaaacaacatgattatagttgggcgctggtcagttataagatgcaaaaggaagtttacaacgaattcattaaaatggttgataaaaaaacgatcgaggctcttgttgatacggcattctataatctcagggaagatgtaaagacgttatttggcgttgatctacaatctgacaaccaaattcaggggcagagtagtcttatgagttggagctttctgttttttaaaaaacaattcattgatagttgcttgaataacgaaaaatgtatcctgcatttacccgagtttatatttaatgataacaagaacttgcttgctttagataccgacacgagcgataggattaaagcggtgaagaattttcttgttgttcttagtgatagcatttgcagtttatttattgttaatagtaatgtggcaagtatctccttggggaatgaatcctttagtacagatgaagatcttgagtatggttatttaatgaacactggcaatcattatgacgtttacctccctcctgaactttttgctcaggcttacaagttaaacaataaggaaatgaatgcgcaactcgactatttaaatcgttatgcaatttaatggcaaaggcatatgctaaaaaccattgttattagtctcacacttttttattggtaaatattgtctctgtattggtaacgccgcagatattctgtttagccacaggtgcaattatcagcggcgtacgcgaggcaggggctaatcaggcatagtttgcgtcaaaccttgcctgtttttgaagatgtatatagaaaaacaggcgttcaacaagccattttgcgaacctgttcccggaaaaaagtcatatttctgtcacactctttagtgattgataacaaaagaggtgccaggaatgaacaaaacgctaatcgccgcagctgtggcagggatagttttactcgctagtaacgctcaggcacaaaccgtaccggaaggctatcagctacagcaagtgctcatgatgagccgccataacttacgtgcgccgctggcgaacaatggcagtgtgctggagcagagtacgccgaataaatggccagaatgggacgtccccggtgggcaactcaccaccaaaggtggcgtgctcgaagtgtatatgggccattacatgcgtgaatggctggcagagcaggggatggtgaaaagcggggaatgcccgccgccgtacaccgtttatgcctatgccaatagtctgcaacgtaccgttgcgaccgcacagttctttattaccggcgcattcccggggtgtgatattcctgtgcatcaccaggaaaaaatgggcactatggacccaacctttaacccggtgatcaccgatgattccgccgcattcagtgaacaggcggtggcggcaatggagaaagagctcagcaaactccagcttaccgacagctaccagctactggaaaaaatcgttaactataaagattcccctgcctgtaaagagaaacaacagtgtagcctggtggatggcaaaaatacctttagcgccaagtatcaacaagaaccaggtgtttccgggccgctgaaagtcggcaacagcctggtagatgcgtttactttgcaatattacgaaggttttccgatggatcaggtggcctggggagaaatcaaatctgaccagcagtggaaggtgttgagcaagcttaaaaacggctaccaggacagcctgtttaccagtccggaagtggcgcgcaatgttgcgaaaccgctggtcagttatatcgacaaagctctggtcaccgatcgcaccagcgcaccgaaaattacagtgttggttgggcacgactccaacattgcctctctgttaacggcgctggatttcaaaccgtatcagttgcatgaccagaacgaacgcacgccgattggcggcaaaatcgttttccagcgttggcatgacagcaaagccaatcgcgatttgatgaaaattgaatatgtgtatcagagtgcggaacagttacgtaatgccgatgcgttaaccctgcaggcacctgcgcagcgtgtgacgctggaattaagcggttgcccgatagacgctgatggtttctgcccgatggataagtttgatagcgtgttgaatgaagcggtgaaataacagaaaactcccccgcgagaagcgggggagtcgctggttaaacgtttttacgttcgatggtctgttcgccccaaaaaaggctatctttatcggtcttagcaaaggctttgactaacacttcatcactaccttcttcccaaatcttttccgccattttttcgtcgtacccggcgacttcgaaaatggcctcggctatttccgggctcgtattgcgcagagatgcccattcaccgacgtgatgagctttcgcttcttgagttggcatgcgtatcctcctgttgaagattagccgttaagtttaactgccagacctgcgacatattccccttgataacgagcaatagacagttcttcctggctgggctggcgactaccgtcaccgcctgcgatggtggttgcgccgtacggcgtaccgccgcgaacctgactaacgtcaaataattcctgcgctgcgtagccaatagggacaattaccatgccgtgatgcgcaagggtcgtccaggtggatgtgatggtttgttcctgaccgccgccagtaccggtggaactaaagacgctcgccagttttccgtatagtgcgccggaagcccacaggccgcccgtctggtcgaggaaggtacgcatttgaccggacatgttgccaaagcgggtaggtgtaccaaaaataatggcgtcgtaatcggccagttcttgcggggttgcaaccggtgcagtttgcgttttaccgcctgctttttcaaataattgcggcggcatggtttccggtacacgcttaacgacaacttcagcgccatccactttgcttgcaccctcagcgactgcgcgtgccatcgtttcaatatgtccgtacatggaataataaagcaccagaactttagccatttctaaccactcctcgtgttatctctattccgtagcgattcgctaccacttatttaaagataagacgtccttttcagagtgcaaatttcacaaccacttatttgatttataacaactttcacaagcacgtaattttgtcgcaaaatgacacatttttatctcatcgcgtttttttaatcataagagcggcttatggataattattggagatgatatctattctcgctaagaagctgttgcaggatattaccaaacgcgggtctgcccgcgtcagttcactaagcttagtcccacgtagcgaaaatatggcagccgccatacgccgcgttaattctatgcaatatgatgtctatacccagacggaggtcagtaatggcaaaccatcgaggcggttccggcaattttgcagaagaccgcgaaagagcaagtgaagcaggtaaaaaaggtggacagcacagcgggggtaatttcaagaatgacccgcagcgcgcatctgaagcaggtaaaaaaggtggtaagagcagtcacggcaaaagcgacaactaaccgggctaatcaatgacgaatgcatttttgtctgtagctcgtcaaaaagccatcaccgccggttacccggtggttgatactgatgacaaatgtaagcttgcctgatgcgcgatgcttatcaggcctaccagaagattgcaatatattgaatttgcactgttttgtaggccggataaggcgtttacgccgcatccggcatgaacaatgcgtacgttgtcaacaatctgcaccgccggtaaccccggcggttttctgtttatggctcctgatgaacaacttctggcggtggaacgtcaaccaactttctgcttaacaacgcattgagtaaaatcgcgccaaaggttgctgtaccaatccctcccaacgtaaaaccgcccagcgtgagagcaaaatcacccgcgcccagcactaaggttactgcgaccataatcaaattaccgttctggcttaaatcgacacggttttgtacccatatccttgcgcctgcgacggcaatcagcccgaacacaacaatacttgcaccaccaataaccgcggccggaatggtatgaatcagcgcaccaaatttcggactaaagcccaacagcatggcgatgacggcagcagcaacaaacaccagcgtgctgtagactttggtcacggccatcacaccgatattttcagcataggtggtcacgccgctaccgccgacagagccggaaagcatcgttgccagaccatcgcctacgaatgcccgccccatatacgggtccatattgcgtccggtcatcccggcgactgccttgagatgacctaagttttccgccaccagaatcaccgccacgggcgcaatcagcatcattgcctgaccattaaaagcaggagtggaaaaatgtggcagaccgaaccaggcagcatggctgacgagagtaaaatcgacggcttttcccagccctaaaacgttggtcatcacgccatacagcagacaggcgacaattaatcctacgagaatcaataaccgctggatcatgccacgggtaaacaccgccaccagcccaatacacagcaccgtcattaccgccatccagctatcaaaggcgctagcgcttacacttttcactgcgataggcgctaagttcaggccaatcgccatcaccaccgcacccgtcaccaccggcggcatcagtcgttcaatccagcgcgtaccgattttcatcaccaccaggccaatgacggtataaaccagcccacaggcgataatcccgcccagcgcaatgctgatattcgggttaatgccctgaccgttaaagcccgtcgcggcgatcaccacgccgacaaaagccgcgctggagccgagataactggggacgcgcccgccggtaataaagaaaaacagtaacgtgccgatcccgctcattaaaatggaaagattgggatccagccccatcagaatcggcattaacaccgtcgcgccaaacatcgccaccgcgtgttgaacgcccattactgccgtctgagcaaacggcaatcgttcatccggcgcgaccacgccgctctctgtagaggtgctttttaactgccagtgaggaaaaccgaacattgccatcagctgtctccttaaggaggttaacaagcagggcgcatcagcgcgtgataactgcgatcgaaccacaccagcccgtagggtgtggtgtgacgatgaatcgcttcgatggcgcaaaacagaatgtcgtgggtgccgacgctcaccacctggctgatacggcagtcaaagctaaccagagcctcttccagttgcgggcatccggtcacccccgtctgccagcgggcggcggcaaagcggtgttccatgggcgttttgccgccaaaaaggttactaagcggctcctgcccggcgctaagtgtatttacacacagcgttcgattttcattgaatgccggccagacggacgccccacgattcaggcacaccagtaatgtgggcggcgtatcggtcacactgcagacggcgctggcggtgaacccggcgcgcccggctggaccgtccgtggtgataatattgaccgccgcgcccatgcaggacatcgcatcgcgaaaagtttgttgatcgacaatgttcatagtttgctccttacaacagcccgcaggcttcttcaaaggacagacgtggcaggcgcgcataaagcttgctgctatcgccatagccgatattaatcagcagattgctcttcagcgtgctgcccgtaaaaaaggcgtcgtccacgtgttgacggtcaaagccgctcatcgggccggtatccagtcccagcgcccggcaggcgacgatcagataggccgcctgcatggaactgttgcgaaacgctgtttcttcggcaagttgtgggctggaggtaaaccaactgcgggcatcaccgtggggaaacagtagtggtaaccgttcataaaattcactgtcccaggcgacgatagcggtgacgggcgcggtcagggttttttgcagattgccgctggaaagtgccgggcgcagacgttcttttccttctgccgtgcgggtaaacacgatccgtgccggagaacagttagcacttgtcggcccccatttcatcagggcataaatctcccgtaacgtctcatcgctgacgggtgtctcccgccagccgttgtgagtgcgggcatcggtgaacagggtgctaagcgcacctgggctaacggcttcgttcatagcaattccttacagggcggcttcacggtgatgtaacaggctggcaagcccgttgagtaacagagcattaaacgtttcgggatcggtcacgttgcaggcgtgtccgccatagggcatcaccattttctggctatcgggcagggcggcatgaagttcactggaacatgctgttggcaccagcagatcatcactggcgcagatgatttgcaccgggcagcggatgcgatccgcatggtgactaaagtcagcgcgtttgagggcgttaagtcgacgcagtaaattatttttgccctgaaaatgcgccagtgccagcgcgtcttctgcctccaggcgaggtgcgcgggccgccatccagtcggcgggatagaggaacaacggctgcgcttccacccatgcctgcgcgccgccgctatacagtaatcgttcgcgaacctgaaaacagcggcgcgtatgggcgtttattcgtagccagccgttaacgctgatcagcacagttacgctcgcgggataatccagcgccagctgcattcccaccagcgcaccgagcgcatggccgaccactgcgtaatgctcaatccctgcggctaccagcgcctgatgcagttccgctgccatctgggcgatactgtaatcttctgccagcgtgtcgggattattgccggtgccgcgctggtcgtaacagactacctgatactcctgctccagcaccgccagttgcggtaaccagtaactgccgctacccccaagaccgctaatcaacaccactacgggcgcatcagcataagggggaggactgagactaagtttcatcgcggcctcacttggcgatatgcgcaattgtggcgatttccaccagcgcgtcaggttttaccagtccgcactgaatgcagaatcgcgccggtttatcacccggaaaaaactcggcgtagatttcgttaatcgcggcgtaatttttccagtcggtaataaagatgctgttgaaggtcacatccgccatcgtgccacccgccgtctcgatcaccttgcggatagtttccagaacgtggcgggtttgcgcctttgggtcatcggcaaacagcacgttattatgttgatcaaaagccagcgtaccggagacatacaccacgccatcagccagcgtgccgggaacgaagggggccagcggtgcgctgctgccagcgggaataattacggattttggcatcgttaaactccttaagcgatatgagcaaaggacgtgggagaaagcgcgtcgcagaatgtttcgacgtcgctgacccagccaaaaaaggtttcgatattgaacaacgcggctttctgcgcaaatttcggccccgcctggtgagttgcgtcttcaagcaccacgccgaaatactccagaaaaaagccgtcgcgtagcgtgctttcgacgcagacgttggtagcgatgccggtgaaaaccagatggcgtattccgcggctgcgcaaaatgctgtccagcggcgtattgaagaaaccgctgtagcgcggcttcggcagcacaatatcgccaggctgcggcaccagttcatccaccagttgataatcccaggagcctttcgccagcaatttcccctgcagctgcggctgcttacgcatggttttcagggcgttgcttttatgaaaattcggactgccgggtccgccagcctcgacatactgttcatcccagccattttgaaaccagatgatcagcatccctgccgctcgcgctgcggtcacggcggtttgaatgttggcaatgaccgggcgagtggtactgacatcaaacccggcgagatctaagtagccgcctggcgtggcataagcgttttgcatatccaccacgatcagcgcactttgctgcggatcgaaggtaatggcttccggtcgagcggttaaggtcgtcatcatgccacctcctgagtcagcgcaggtagatgggcgcggcattgcatcagtggttgaatgcgctcgccgaaggtttcgattccgctcagaaaatcgtcgaaggttaacagcacgccttcggcaccaggcacgcttgcgacttcatctaacatgcgcgcgacactggcgtaagaaccgactaacgtccccatattgatgtttaccgcgctagtgggatcggccatctgacgaacgttggtgtcagtaccggagcgggtatctttctgactttgttcggttagccagcttaacgcctcttcatccgcgcccgctttgtagtgttcccatttggcgcgagcggcatcgtcggtttcatcggcaatcaccataaacaacacataagagccaacgtcgcgtccggtttgctctgcggcctgtttcatccgcgcagcggtcggggcgaaagccgtgggtgtatttacgcctttgccgaaacagaagttgaaatcggcataccgggcggagaacgccatgccagcgtcgctttgcccggcgcagatcactttcatggggacactcggttgcggactcacgcgacaatcattcatggtgaaaaaatcgcctttaaaatcgcttttccccgtgccccacaggtcgcgcagcacctgaacatattcggtgagatagtcgtaacgacgggagaaatagtcatcgccaggccagatacccatctgctcatactcgggcttttgccagccagtcacgaggttgacgccaaaacgcccgccagagatggagtcgatggttgcggccatacgggcgacgattgccggaggtaacgttaaggtggcagcagtggcgtaaatctgaatgcggctggtcacggccgccagccccgccatcaaggtgaagctctcaaggttgtgatcccagaactcagttttgccgccaaagccacgcagtttgatcatgctcagggcgaaatcgaaatggtagtgctccgctttttgcacaatggctttattcagttcaaaggtcggcatgtactgcggcgcgtgggtgctaatgagccagccgttgttgccaataggtacgaatacgccaattttcatcatcaacctctcttcgtctcgtaaagtgaaagtcagacggggcgctgcatcctgcatatccttttcagccgcgtattggcttgtttgcaaagcggatgccagtttttaaaaagttaatgttattaatctgttaacattacgttatctaaaatatctggtaaaaagtggactaaacggtcaaaacagttgcacataaaacatgcatctgtgcgcgatgagagtgcagaaggtcgaggccgggcgggggttttgctatcctgttgccaatctacaagaggggagagcgcatgacgcaaggcgcagtgaaaacaacgggtaaacgtagccgcgcagtaagcgcgaagaaaaaagcgattcttagcgcagcactggacacttttagtcaattcggttttcacggcacaaggctggagcagatcgcagagttggcgggtgttagtaaaaccaatctgctgtattactttccgagtaaagaggcgctgtatattgccgtgctgcggcagattctcgatatctggctggcaccgttaaaagcgtttcgtgaagatttcgccccgctggcggcgatcaaagagtacatccgtctgaagctggaagtcagtcgcgattatccgcaggctagccgcctgttctgtatggagatgctggcaggcgcgccgctgttaatggatgaactgacgggcgatttgaaggcattaattgatgagaaaagcgcgctgattgccggttgggtcaaaagcggcaaactcgcgccgattgatccgcagcatttgatttttatgatttgggcttccactcaacattacgccgatttcgcccctcaggtggaggcggtgacaggcgcgacgttgcgcgatgaggtatttttcaatcaaacggttgaaaacgtgcagcggattattattgaggggattcgaccacgttaaagatgccggaggaggttgtaacatcctccggctacctgtttaacctatagtcattaagctggcgttaccgccagcggcagcggtattcacactcaggctacgctcgatatacagccgttccagaaggatattgctttcgccacgggcaaaaccctgcacgctaacaattgtgccatcccgcgcggcaactgcttcacacaatgcgcgaagctgatcgctatcaccgtggaagatcaccgcatcaaacggttgagcggttatattttccgctttcgccagttgaatacgttcgctgactgcgcttggcaatgccttcactaactgacgatgcagcgcgtcatccggccacagtacctggctgcccaccgccagcacggcggcgagctgagtcagcgcatcctgctcatcatcggcaatacacaacacgcgctcacgcggcagcagcgtccaggtgttgcgttcacccgtcggccccggcagcaatcgttgtgttcctgcctgcgccagctcgccatattgcgtacataacgcctgcaattctggacgatttgctgcccattcccgcagtgcatttagcggctgagtcaatgcggctttcaactgcgcatcgaccggatactttgcatcctgacgcgcgagcgtcactgccagcgcactttccgggcgattcgccagcagacggtagagatagagcggaccgcctgctttcggcccggtaccggacaacccttcgccgccgaacggctgcacaccaaccactgcgcccaccatattacggttaacatacaggttaccaacatgggcgctgccagtgacctgggcgatggtttcatcaatgcgcgtatggacgccaagcgtcagaccataaccggaagcgttaatctgctcgatcagctctggtagctggttacggttgtaacgcaccacatgcagcaccggaccaaagacctctttttgcaattcggcaaagtcatccagttcgatcagcgtcggggcgacaaaggtgccgctttgccattcacgggcatcttcgctgttttcccgcaccgcctggaacaccggacggcctttgctacgcatggtctgaatatggcgctcaatattggctttcgcttcgctatcaatcactggaccgatatcggtggtcaggcgacccggattacccatccggcattcggccattgcgccgcgcagcattttcaacgtgtggtcggcaatctcatcttgcaggcacagcacgcgcagcgcgctacaacgctgacccgcactgtcgaacgcgctggccagtacatccacgacgacctgttcggtcagtgcactagaatcgacaatcatcgcgttcatgccgccggtttcagcgatgagcggaatagggcgaccctgagcgtccaggcggctggcgatattgcgctgcagtaacgtagcgacttcggtactaccggtaaacatcaccccgcgcacgcgatcatcacccgtcagttgcgcgcccacggtttcaccccgacctggcagcaattgcaccacgcctggcggtacacccgcttccagcaaaatggcgatcccttgcgcggcaatcagcggcgtttgttctgccggttttgccagcacgctgttacctgccgccagtgcggcggcgatctgcccggtgaaaatagccagcgggaagttccacggactgatacacaccacaggccctaatggacggtgggtttcgttagcgaaatcatcccgcacctgtccggcgtagtagtggagaaaatcgaccgcttcgcgcacttcggcaatggcgttactgaaggtttttccggcctcacgcaccagaataccaatcagttgctgcatctggctttccatcagcacggcagcgcggtgcaaaatcgctgcgcgttcagccggaggcgtggcaaaccagattggcgcgttattaaccgcactttccagcgcctgttctacttcacgcggcgtggcttcacgcacatagcccacaatatctttcggttccgcagggttaataacggggctcatctcacctgccgctaccggttgttccagcattggcaaggcctgccatttttgcagtgcactattgagcagggcagaggagaggctggccaggcggtgttcgttagcgagatccagccctgcgctgttgtcgcgcccgtgaccgtaaagatcgcgcggcaggggaattttcggatgcggtaatccagtttgcccttcctgttgcgccagtttttctacagcagtgaccggatcggcgaccagttcatccagtggcaaagaggtgtcggcaatacggttaacaaagctggtgttagcaccgttttccagcaggcgacgcaccagatacgccaacagcgtttcatgtgtgccaaccggagcataaatacgacacggacggttaagtttgccgtcggcaactttcccggggacctgctcatacagtggctcgcccataccatgcaggcactggaactcgtactgacccgggtagtagttctgccccgccagttgataaatcgccgccagcgtatgggcgttgtgcgtcgcgaactgcgggtagattagattcggcaccgccagcagctttttcgcacaggcgagataagaaacgtcggtatacaccttgcgggtataaaccggataaccttcaaggccgtccatctgcgcacgcttaatttcactatcccagtacgcgcctttcaccaggcgaatcatcagacggcgacggctgcgggtggcgagatcaatcaggtaatcgatcaccaacgggcagcgtttttgataagcctgaataacaaaaccgatgccgttccagcctgccagttccggctcgaaacagagtttttccagcagatcgagggagatctccaggcgatcggactcttcggcgtcaatgttgataccaatatcgtactgacgcgccagcagggtgagacttttcagacgcgggtaaagctcttccattacccggtcatactgggcgcggctataacgcggatgcagcgcgctcagtttgatactaatgcccggcccttcatagatgccacgaccgttagacgctttaccgatggcgtgaatcgcctgctgataggaaaccatatacgcctgtgcatctgcggcggtcagcgcggcttcgcccagcatatcgtaagagtaacggaaacctttctcttccagcttgcgggcattggctaacgcttccgcgatggtttcgccagtgacgaactgctcacccatcaggcgcatcgccatatccacacctttgcggatcagcggttcaccgcttttaccgataatgcggttcaggctgcgggagaggctggcttcgttatgggtggaaaccagtttgccagtaaacagcagcccccaggtggcggcattaacaaacagactcgggctacgaccaatgtgactctgccagttaccgttgctgattttgtcgcgaattaacgcgtcgcgggtggctttgtcgggaatacgcaacaacgcttccgccagacacatcagcgccacgccttcctggctactcaggctaaactcctgcaataacccctggaccatacctgcgcgaccactggcatttttttgattacgcagtttatcggccagctgatacgccagtttgtgcgcctgttcagcaactggctgcggcaggcgggcttgttccagcagcatagaaaccgcttcggtttccgggcggcgataggccgcggtgatcgcggcgcgggaaacgctctggggcaatatttgctcggcaaagtcgaggaatggctggtgtggttcctctgccggagtcggtgcttcatcgctctcattggccgcgccagaaagcagcgcaggtagctccggcagagtatcgctgttttccagttgttcgagataagaaaaaatcgcctgcttaattaaccagtgtggtgtgcgatcgatacgtgtcgcggcagacttaatacgctcacgcgtcgcgtcgtccagcttaacccccatggtggtggttcccatgccattactcctgttgttcagaaaggtgcaacttaacgttatcgtgaaatatccatgatgttgcaactttgtgcaaccatgttaaatgtgacatgcgtagcaagcttaaaaatgaatgaaatgttaataaaagaaatcgatatgacagggattaaaaaaataactcagactttttctctgcggcagttaacatttttgaaaggtgcaaccgcaaaaaatgtgagagagtgcaacctgatgaaaaatagtgtcgctgagcactaaaatttaatgtaaatggtgtgttaaatcgattgtgaataaccagcgcttccggcaggatacggtcgccctggtaaaacataaactctgttaccccgttccggtggcagatataacggcaagtttcgacattgccgataataattttttggagactttagatggctattagcacaccgatgttggtgacattttgtgtctatatctttggcatgatattgattgggtttatcgcctggcgaagtacgaaaaactttgacgactatattctgggcggtcgtagtcttgggccattcgtgacggcattaagcgcgggtgcgagcgatatgagcggctggctgttaatggggttgccgggcgctgtttttctttccgggatttccgaaagctggatcgccattggcctgacattaggcgcgtggattaactggaagctggtggccgggcggttgcgtgtgcataccgaatacaacaataacgccttaacactgccggattatttcaccgggcgctttgaagataaaagccgcattttgcgcattatctctgcgctggttattttgctgttcttcaccatttattgcgctagcggcattgtggcaggcgcgcgtctgtttgaaagtacctttggcatgagctacgaaacggctctgtgggcgggcgctgcggcgacgatcctttacacctttattggcggtttcctcgcggtgagctggactgacactgtacaggccagcctgatgatttttgccctgatcctgacgccggttatcgtcattatcagtgtcggtggctttggtgacagcctggaagtgatcaaacaaaagagcatcgaaaacgttgatatgctcaaaggtctgaactttgttgccattatcagtctgatgggttgggggctgggttacttcgggcagccgcacattctggcgcgttttatggcggcggattctcaccacagcattgtccatgcgcgtcgtattagtatgacctggatgatcctctgcctggcaggggcggtggctgtcggcttctttgggattgcttactttaacgatcatccggcgttggctggtgcggtaaatcagaacgccgagcgtgtgtttatcgaactggcgcaaattctgtttaacccgtggattgccgggattctgctgagcgcaattctggcggcggtaatgagtaccttaagttgccagctgctggtgtgctccagtgcgattaccgaagatttgtacaaagcgtttctgcgtaaacatgccagccagaaagagctggtgtgggtagggcgtgtgatggtgctggtggtggcgctggtggcgattgcgctggcggcaaacccggaaaaccgcgtgctgggcttagtgagctacgcgtgggcaggctttggcgcggcgtttggtccagtggtgctgttcagcgtgatgtggagtcgcatgacgcgtaacggtgcgctggcggggatgatcatcggtgcgctgacggttatcgtctggaaacagttcggctggctgggactgtacgaaattattccgggctttatcttcggcagtattgggattgtagtgtttagtttgctgggtaaagcgccgagtgcggcgatgcaaaaacgctttgccgaggccgatgcgcactatcatagcgctccgccgagtcggttgcaggaaagctaagggacttagcctgcggcggttttgtttggcttcagcagcgggttgcgctcccttaatgtgcctcgccatataaattgaatggtgcagggagcgcgcagggggcggccaatcgccgccgccccctgctgtcccggccttcggggaacgcttcagcgattttgacgccaccaacacccgagctgttattatgttccgggcaaaaagttagatttgataatcgcggatggacgaaattgcttgatacacccgcttatcagttttacatggaagctctgatgcattgagtctggacagttttgtcggctggatacggcgtttacgcggcatccggcaagaacacatggttctttgcaaacaatcccatctttctaccctggaataatcgtttatatcccttggcattacctctctttgtttacattccaacatcattttataaacattccgcttgtgtttttctttgccgtaatgataatcgctatcactgcgatttacttttctttgcatagattgactcagaaaaacgtttaagggtgggtggcatgtttgttccgtttctcattatgttgcgcgaaggacttgaagccgcgctgattgtcagtttgattgccagctatcttaagcgtacccagcgaggccgatggattgtgtgatgtggattggcgtgttgcttgccgctgcgttgtgcctgggcttgggtatcttcattaacgaaaccaccggcgaatttccgcaaaaagaacaggaactgtttgaaggtatcgtggcggtgatcgccgtggtgatccttacctggatggttttctggatgcgcaaagtgtcgcgcaacgtcaaagtgcaactggaacaggcagtcgatagcgcattgcagcgtggaaatcatcatggctgggcgctggtgatgatggtcttttttgccgttgcaagggaagggctggagtcggtctttttcctgctggcggcatttcaacaagatgtcgggatctggccgccgctgggtgcaatgctcggtcttgctactgccgtggtgctaggcttcctgctctactggggcggtattcgcctcaatcttggtgcattttttaaatggaccagcctgtttattctcttcgtcgccgcagggctggcagctggtgccattcgcgcatttcatgaagccggattgtggaaccactttcaggaaatcgccttcgatatgagtgcggtgctctcaactcactcgctgtttggcacgctgatggaagggatttttggctatcaggaagcgccgagcgtcagcgaagtcgccgtctggtttatttatctcatcccggcgctggtggcatttgctctgccaccacgcgcaggggcgacagcgtctcgctccgcgtaacaaatacgacgcaaactcttgcttagttacaacatactttaaagggatagtctcgtcatgaccattaacttccgccgtaacgcattgcagttgagcgtggctgcgctgttttcttctgcttttatggctaacgccgctgatgtgccgcaggtcaaagtgaccgtgacggataagcagtgcgaaccgatgaccattacggttaacgccgggaaaacacagttcattattcagaaccacagccagaaggcgctggagtgggagatcctcaaaggcgtgatggtggtggaagagcgggaaaatatcgcccctggctttagccagaaaatgacggcgaatttacagcctggcgaatacgatatgacctgcggtctgctgactaacccgaaagggaagttgatcgtcaaaggtgaggcaacggcggatgcggcgcaaagtgatgcgctgttaagtcttggtggtgcaattactgcatataaagcgtatgtcatggcggaaaccacgcagctggtgaccgacaccaaagcctttaccgacgcgattaaagcaggcgatatcgaaaaagcgaaagcactgtatgcaccgacgcgccagcactatgagcgtattgaaccgattgctgaactgttctccgatctggatggcagcattgacgcccgtgaagatgattacgagcaaaaagccgccgacccaaaattcactggtttccaccgtctggaaaaagcattgtttggcgacaacaccaccaaagggatggatcagtacgctgagcagctttataccgatgtggtcgatttgcaaaaacgcatcagtgaactggctttcccacctagtaaagtggtcggcggcgcagccggactgattgaggaagtggcagccagcaaaattagcggtgaagaagatcgctacagccacaccgatctgtgggatttccaggctaacgttgaaggcagccagaaaattgtcgatttgctgcgtccacaactgcaaaaagccaacccggaactgctggcaaaagtcgatgccaactttaaaaaggtcgataccattctggcgaaataccgtactaaagacggttttgaaacctacgacaaattgaccgatgccgaccggaatgcactgaaaggaccgattactgcgctggcggaagatctggcgcaacttcgcggtgtgctgggactggattaagcgttatgcagtataaagatgaaaacggcgtgaatgaaccgagtcgccgacgtttactgaaagtgataggtgcactggcgctggcgggaagttgtccggtcgctcatgcacaaaaaacgcaaagtgcgccgggtacgcttagtccggatgctcgcaatgagaaacagccgttttatggtgagcatcaggcagggatcctgacgccacaacaggccgcaatgatgctggtggcgtttgatgtgcttgccagcgataaagccgatcttgagcggttgtttcgcttgttgactcagcgttttgcttttctgactcagggcggagcagcaccagaaacgccaaatccgcgcctgccaccactcgattccggcattcttggcggctacattgcgcccgataatctcaccatcacgttaagcgtgggtcacagtttgtttgatgagcgctttggccttgcgccacagatgccaaaaaagctgcagaagatgacgcgtttccccaacgacagcctggatgcggcgttatgtcatggtgatgtgttgctacagatttgcgccaacacccaggacacggttatccatgcgctgcgcgatatcatcaaacacacgccggatttgctcagtgtgcgctggaagcgggaagggtttatttccgatcacgcggcgcgtagtaaaggcaaagagacgccgattaatttgctgggtttcaaagacggcactgccaatcccgatagccagaatgataagttgatgcaaaaagtggtgtgggtaacggcagatcagcaggagcctgcgtggacaatcggtggcagctatcaggcagtacgcttgattcagtttcgagtggaattttgggacagaacgccgctgaaagaacagcagacgatttttggccgtgataagcaaaccggtgcgccgctgggaatgcagcatgagcatgatgtgcctgattacgccagcgacccggaagggaaggtgatcgcgctggacagccatatccggctggcgaatccccgcacggcggagagtgagtccagcctgatgctgcgtcgtggctacagttatagtctgggcgtcaccaactccgggcaactggatatggggttgctgtttgtctgctaccaacacgatctggaaaaaggcttcctgacagtacaaaaaaggctcaatggcgaagcgctggaggaatacgttaaacctatcggcggcggttatttttttgcgctgccgggggtgaaggacgcgaacgattatttcggaagcgcgttattgcgggtttaatgtttttaggcggataaggcatttgtgcgcagatgcctgatgcgacgcttgcgcgtcttatcatgcctacaatcagtgcgggtttggtaggctggataaggcgttcacgccgcatccggcgatcgtgcactgatgcctgatgcaaatcctgctgaaagcacacagcttttttcatcactgtcatcactctgtcatctttccagtagaaactaatgtcactgaaatggtgttttatagttaaatataagtaaatatattgttgcaataaatgcgagatctgttgtacttattaagtagcagcggaagttcccggcagtgatagtcagtcactatggagatcgcggatggtaacgtcctgtactggacatgttttagataatcaacgcgccaccactcgcggagttttctcctccggtagtcatctcgtcactttgcattttcaacctcatcctttctttagttgtgttaccgacgccgtaaacggtgcgcgtagccgttttagcgcattttatccaaaagcaaactatggcttacaaggaagccaaccctctgatgttcgtgcgcataatcgcgctgccaacggcgcgtgtgatgaatacaaacaactcaaggtgctctccatgggaagacaaaaagcagtgatcaaagctcgtcgcgaggcaaaacgtgtgctgagacgggatagccgcagccataagcagcgtgaagaagaaagcgtcaccagccttgtgcagatgggcggcgtagaagccattggtatggcccgcgacagtcgcgatactagccccatcctcgcgcgaaatgaagcgcaattgcactatctgaaggctattgagagtaagcagctgatattcgccacgggcgaagccgggtgcggaaaaacctggatcagcgcagcaaaagcggcagaggccctgatacataaggatgtcgacaggattatcgtcacccgtccagttctgcaagccgatgaagatcttggcttcttacctggagatatcgcagaaaagtttgctccctattttcgcccggtctacgacgtgctggtccggcgcttaggggcttcctttatgcagtactgcctgcgaccggaaatagggaaggtggaaattgcgccgttcgcctatatgcgtggacgtacctttgaaaatgcagtcgtcattcttgacgaggcgcagaatgtgactgccgcgcaaatgaaaatgtttttaacccgcctcggggagaacgtgacggttatcgtcaacggtgatatcacgcaatgcgatttgcctcgcggcgtgtgctccggattaagtgacgcgctggaacgtttcgaagaagatgaaatggttgggatcgtccggttcggtaaagaggactgcgtacgtagcgcactttgccaacgtacgctgcatgcctacagttaagtgtgttatcggtgcagagcccgggcgaaccgggctttgttttgggtgttcccggtgtgtgcaatatacgaaaaaaaagcccgtactttcgtacgagctcttctttaaatatggcggtgagggggggattgactcgcttcgctcgccctgcgggcagcccgctcactgcgttcacggtctgtccaactggctgtcgccagttgtcgaaccccggtcggggcttctcatccccccggtgtgtgcaatatacgaaaaaaaagcccgtactttcgtacgagctcttctttaaatatggcggtgagggggggattcgaacccccgatacgttgccgtatacacactttccaggcgtgctccttcagccactcggacacctcaccaaattgtcgttcctgtcttgctggaacgggcgctaatttagggaaatcatgacctgaggtcaacaaactttttgaaaaaatcgcgcgtttattcaaacttcaatcaatgtgtggttttaataagcgaaatctgctttttttgccaccgaccacggatttgttatgctggtggcctttgtagatcataacgataagtgcgaataaatttcgcacaacgcttttcgggagtcagtatggatatcatcttttatcacccaacgttcgatacccaatggtggattgaggcactgcgcaaagctattcctcaggcaagagtcagagcatggaaaagcggagataatgactctgctgattatgctttagtctggcatcctcctgttgaaatgctggcagggcgcgatcttaaagcggtgttcgcactcggggccggtgttgattctattttgagcaagctacaggcacaccctgaaatgctgaacccttctgttccactttttcgcctggaagataccggtatgggcgagcaaatgcaggaatatgctgtcagtcaggtgctgcattggtttcgacgttttgacgattatcgcatccagcaaaatagtagccattggcaaccgctgcctgaatatcatcgggaagattttaccatcggcattttgggcgcaggcgtactgggcagtaaagttgctcagagtctgcaaacctggcgctttccgctgcgttgctggagtcgaacccgtaaaagctggcctggcgtgcaaagctttgccggacgggaagaactgtctgcatttctgagccaatgtcgggtattgattaatttgttaccgaatacccctgaaaccgtcggcattattaatcaacaattactcgaaaaattaccggatggcgcgtatctcctcaacctggcgcgtggtgttcatgttgtggaagatgacctgctcgcggcgctggatagcggcaaagttaaaggcgcaatgttggatgtttttaatcgtgaacccttaccgcctgaaagtccgctctggcaacatccacgcgtgacgataacaccacatgtcgccgcgattacccgtcccgctgaagctgtggagtacatttctcgcaccattgcccagctcgaaaaaggggagagggtctgcgggcaagtcgaccgcgcacgcggctactaataaagcatcaggattcctgctatccttggcgggaattgaatacaggagagagttatgtatcccgtcgaccttcatatgcataccgttgccagcacacatgcatatagcacattaagtgattacattgcccaggccaaacaaaagggcattaaactttttgcgatcaccgatcatggcccggatatggaagatgcgccgcatcactggcacttcattaacatgcgtatctggccgcgagtggttgatggggtagggatcctgcgcggcatcgaagctaacattaaaaatgttgatggtgaaattgactgcagcggtaaaatgtttgacagcctggatctaattattgccggttttcatgagccggtttttgcgccacatgataaagcgaccaatacacaagcgatgatcgccactatcgccagcggcaatgtgcatataataagccatcccggaaatcccaaatatgaaatagatgtgaaagccgttgctgaagcagccgcgaaacatcaggtggcgctggaaatcaataattccagttttttacacagtcgtaagggcagtgaagacaactgtcgtgaggtagccgcagcggtacgtgatgctggaggttgggtggcattaggcagcgattctcacaccgcgtttaccatgggggaatttgaagagtgtcttaaaatcctcgacgcggtagattttccgccagagcgcattttgaatgtttctccgcgccgcttactgaacttccttgaatctcgcggtatggcaccgattgcggaatttgcagacctttaattactagtaatggaaatatattaatgaacgagttttctatcctctgtcgtgtgctgggtagcctctattaccgccaaccacaagatcctttactggtgccgctgtttaccctgattcgtgaggggaaactggctgcgaactggccactggagcaggatgagttgctgacacgtttgcagaaaagctgtgatatgacgcaagtctctgccgattacaatgcgttgtttatcggcgatgaatgtgctgtgccgccatatcgtagcgcatgggttgagggcgcgacggaagcggaagtgcgcgcttttctttctgagcgagggatgccattagcggatacgccagccgatcacatcggcacattgctgctcgcagcttcctggctggaagatcagagtacggaagatgagagcgaagcactggaaacactgttcagtgagtatctgttaccctggtgtggtgcgttccttggcaaagtggaggcccatgcaaccacgcctttctggcgcaccatggcaccgctaacccgcgatgccattagtgcaatgtgggacgagctggaagaagattctgaagaataagtgtgatctacgtcactcataactgcaacggataatttgttgttgcataaaatgtgtgctcgatctcattcatggccgcgttttctgctatcatgcgcggcatgaacatacttctctctattgcaatcacaacaggcattctctccggtatctggggatgggtggctgtttccctgggcttactaagctgggcgggcttcctgggctgtacggcctactttgcctgcccgcaaggtgggctgaaagggctggcgatctccgctgcaaccctgcttagtggcgtggtgtgggcgatggtcattatttacggtagtgcactggcaccacatctggaaattctcggttatgtcataaccggtattgtcgcgtttctgatgtgtattcaggccaaacagctgctgcttagttttgttccggggacgtttataggcgcatgcgcgacgtttgccgggcagggtgactggaaactggtgttacctagcctggcgcttgggctgatatttggttacgcaatgaaaaacagtggcctgtggctggcggcgcgtagtgcaaagacggcgcaccgtgagcaggaaatcaaaaataaagcgtgaggggcactcacgctttcgcttaaacagtaaaatgccggatgataattccggcttttttatctgtcaggattccggtggaacgctcatatggcggtatttcaccagaatgtcattctgccgttctgctttattttgcaaatcccacagaccacggtcgataccatcattaatcaggaaaatgacccctgtttcgatagcgctcatcaggcacagcataacaggttcgttgctggtgtaacccacttccccttcaagcaagcgctggtagtcaataaagcggaaaaccccggcctgaacttcataggaaagtatcgtcttactggtgttcacgctagaaaggatctcgccggtactcacattgacgacgcgcaggttcacggcaatctgatcgagctggtattgcgtgtcggcaccgatgccaaaatatcttgccccaaccccgccagatttgacgttgctttcataaccgataatgctaccttcaaccatgatatttgccgccgttaaagattgcagcgggattcggttattaatggcaaccgtgccgttttcttgtgccgcacgaataatcttgcgctcgttaagcaggttttgtaagccctggcgctccagcggtataaaccagcgagaatctttcagtgccgtgaccagcattgccgtggcgctttgcggaacagcagtggagaagttacttgccgggtagggtttaaattgcccggtttcgtcctgaatgttgtatacgctaacaaagattttacccgtcggcgctggcagatgggtcaaatctttgtagctctgagcacgaggcattaatgtcggtctggcggcttctttaggcggggcggttaagcatccgctcagtaacatgacggcaaccaaaagaaataagcgctgcatgattattttccttatgaagctggggcttaaaaatcggtactgttattttgtaaaccgctaacctggatggtgctggtttgtccggttttacgatctgtcacgttcaactgcaattgaccatcgcggttggcaatatcgacaatataatcgttggtcaccatgcggcccggtttaccggtattaatattgctcagtagcccacctaaaatttgactctggatggcctgagtaaagttatctaacgcactgggtgtttcaataccaaagtcatcgttatagctcggatctttataagagttttgggcctgagcgctatttaataaaaaagcgccattatttgggttaccaccaaagtttggattacggaactggaaagtcatggttccagcccaacttaatgggctaataagcatgagtagaactactgcatgtttgacacgcattgcagcctccgaacaattttttatttagaattcatcatgcgccaaatcgcccgtacttaataacgcctgatttatctggcgacgatttagtgcttcttcagtttgaatcagtgcaaagacgacagttttctcgaagtctcttttcaacggaaataaaaaagtctggaaaataacgtcctgattgaccgttatagtgatccagcttccccatcgtgcactgggcctttcattaatcgttaagttacccgtatagtcactttcccatttatcactaaaggctcggtaaaaatcatggccaatagaactaacagtatggtcagttagcaatcccgggacttctacctcaacggcgtgaagattccctgcggcgaacagaaattctgccgccacaatccagcgtaaataacgtttcatggctttatcgcctgaggttatcgtttgcccaggaaaccgcttgtgtccggttttttacggctatcttcttgaaaagattataaagatgcgttttaaccgtattttcgctgatgaacaagctacgagcgatctcgttattagacgcgccgatacgcagcttattcaggatctctttttcccgatgagtaaggagggcactttccgtgctgttataacgatagttaccactatgcgtaatcaggtagctggcaagcttttgcgtaaagtagcattcgccgcgcaggacgccttgcaacccattgacaacacgttcttgatcctccatggaataaaaaacgccgttgatatgaggccagttttcaatgtcgcggtacgggtaatcttcaggcgtatttagcaacaatattttgatattgttgtttttcctgctcaaagtatcctgccaataatggataagctttttatccgcttccatcatatccagaagaataatagagccactagagatatcgtccagagaacgttgaatattatgtaattttcctgtaattgccaggctttgtttaaggtgctgcaagagagctgtcgcctgcaaagaagatttagtgatcaacaataatgtatgaccatgaatactatggacttcattaaacatgatgaaaccccgctttttttattgatcgcacacctgacagctgcctctaaaatagaagcaccagaagtactgacagatgttgcactgctgtgtgtagtaataaatcagccctaaatgggtaaaatataaaactaatggattacatctgatttcaatctagccattacaaatcttaaatcaagtgttaaacatgtaactaaatgtaactcgttatattaaaatgttaaccttaaggttttattaagtttagaaatgatagaaaagttgtacatttggtttttattgcacaattttaaaaaatcatacaaatggtgataacttactaataatgcatataaaaaatatttcggtgtagtcctttcgtcatgtaaaacgttcttgttttttctccacacctccgtggacaattttttactgcaaaaagacgaggtttgtcacggcttgtgcgcaagacatatcgcagcaatcagcgacgggcaagaagaatgactgtctggtgctttttgatagcggaaaacggagatttaaaagaaaacaaaatatttttttgcgtagataacagcgtatttacgtgggttttaatactttggtatgaactaaaaaagaaaaatacaacgcgcgggtgagttattaaaaatatttccgcagacatactttccatcgtaacgcagcgttaacaaaatacaggttgcgttaacaaccaagttgaaatgatttaatttcttaaatgtacgaccaggtccagggtgacaacatgaaaaacaaattgttatttatgatgttaacaatactgggtgcgcctgggattgcagccgcagcaggttatgatttagctaatagtgaatataacttcgcggtaaatgaattgagtaagtctagttttaatcaggcagccataattggtcaagctgggactaataatagtgctcagttacggcagggaggcagtaaacttttggcggttgttgcgcaagaaggtagtagcaaccgggcaaagattgaccagacaggagattataaccttgcatatattgatcaggcgggcagtgccaacgatgccagtattagccaaggtgcttatggtaatactgcgatgattatccagaaaggttctggtaataaagcaaatattacacagtatggtactcaaaaaacggcaattgtagtgcagagacagagccaaatggctattcgcgtgacacaacgttaatttccattcgacttttaaatcaatccgatgggggttttacatgaaacttttaaaagtagcagcaattgcagcaatcgtattctccggtagcgctctggcaggtgttgttcctcagtacggcggcggcggtaaccacggtggtggcggtaataatagcggcccaaattctgagctgaacatttaccagtacggtggcggtaactctgcacttgctctgcaaactgatgcccgtaactctgacttgactattacccagcatggcggcggtaatggtgcagatgttggtcagggcagtgatgacagcagtatcgatctgacccaacgtggcttcggtaacagcgctactcttgatcagtggaacggcaaaaattctgaaatgacggttaaacagttcggtggtggcaacggtgctgcagttgaccagactgcatctaactcctccgtcaacgtgactcaggttggctttggtaacaacgcgaccgctcatcagtactaatacatcatttgtattacagaaacagggcgcaagccctgttttttttcgggagaagaatatgaatacgttattactccttgcggcactttccagtcagataacctttaatacgacccagcaaggggatgtgtataccattattcctgaagtcactcttactcaatcttgtctgtgcagagtacaaatattgtccctgcgcgaaggcagtagtgggcaaagtcagacgaagcaagaaaagacccttagtttgcctgctaatcaacccattgctttgacgaagttgagtttaaatatttccccggacgatcgggtgaaaatagttgttactgtttctgatggacagagtcttcatttaagtcaacaatggccgccctctagtgaaaagtcttaatttgttgaaatatcgagcataagatgaatctggagagaatggtctgctgcgaatcagccaacctgaaagtatggataacacaaccctcaaggatgactaatcattgaggaaatagaataaatgttcagaccttttttaaactctcttatgctcggcagtttgttttttccttttattgccattgctggaagcaccgtgcaagggggcgtgatccatttttatggccaaattgtggaaccggcatgtgacgtcagcacccagagtagtcccgtagaaatgaactgcccacagaatggttctattccgggcaaaacctactccagcaaagcgttaatgagcggcaatgtcaaaaacgcgcaaatagccagtgtaaaagtgcagtatcttgataaacagaaaaagctggctgtaatgaacatcgaatataactaagtttctgaacaactcacgttgctgagcagaaaaatgcgatttaaccaaaaagcctgctgtacacttaagaaacaagaaggtgtaaggaggcgttatgaaaacgcgtattcatgttgtgcagggtgatattaccaaactggccgttgatgtgattgtgaatgcggctaatccgagtttaatgggaggcggcggcgtcgatggggccattcatcgcgcagcgggtccggccctgctggatgcttgtttaaaagtcaggcaacagcagggcgattgccctacggggcatgccgttattacgcttgcaggcgatcttcccgctaaagccgtagtgcacaccgtcgggccagtctggcgtggtggtgaacaaaacgaagaccagcttttgcaggatgcctatctcaatagcctacgactggtggcggcaaacagctatacgagtgtggcttttcctgcaatcagtactggggtttatggttaccctcgtgcggcagcggctgaaatcgcagtaaaaaccgttagtgaatttattacccgtcacgctttacccgaacaggtatactttgtctgttatgatgaagaaaacgcccacctctacgaaagactccttacccaacaaggagatgaatgatttgccccggctggcgagcgcggtgctgccactgtgtagccaacatcccggtcagtgtggcctttttcctctggagaaaagtctggatgcgtttgccgcccggtatcgtctggccgaaatggcagagcatacgctcgatgttcagtattacatctggcaggacgatatgagcggtcggttactgttttccgccctgttagccgcagcaaagcgtggcgttcgcgtccgtttgttgctggacgacaacaatacgcccggacttgacgacattttacgcttgcttgacagtcatccacgcattgaagtccggctttttaatcctttcagctttcgcttgctgcgtccgcttggttatatcaccgacttttcccgtcttaatcgccgtatgcacaataaaagtttcactgtcgatggcgtggtgaccctggtgggaggacgaaatattggtgatgcctattttggagcaggggaggagccactttttagcgatttagatgtcatggcaataggacccgtggtagaggacgttgccgatgatttcgcccgctactggtattgcaaaagcgttagtcccttacagcaggtgctggatgtcccggagggtgaaatggcggatcgcatcgagttacccgcctcctggcataacgatgccatgacgcatcgttatttacgcaaaatggaatccagtccatttataaatcatctggttgatggaacattgccgcttatctgggcgaagacacgtttattaagtgatgatccggcgaaaggggagggcaaggcaaaacggcatagtctgttaccgcagcgcctgttcgatatcatgggcagtcccagtgaacgcatcgatattatctcttcctattttgtaccgacacgcgcaggtgtggcgcaactcttacggatggtgagaaaaggggtaaagattgcgatcctaaccaattctcttgccgctaacgatgttgctgtcgtccatgccggatacgcgcgctggcgcaaaaaattgctccgctatggcgtggaattatatgaactcaagccgacgcgtgaacaaagtagtacgttacacgatcgcggcataaccggtaattccggagccagcctgcatgctaaaacctttagcatcgatggtaaaacggtgtttatcggctctttcaatttcgatccgcgtagtacattgctcaatactgaaatgggcttcgtgatagagagcgaaacgctggcacagttaattgataaacgctttattcagagccagtatgatgcggcctggcagctccgtctggacaggtggggacggatcaactgggttgatcgtcatgcaaagaaagagattattctcaaaaaagaacccgccaccagtttctggaagcgggttatggtcagactggcgagcatattgcccgtggaatggttattgtaaatgtggcttaacgggctggtgctttatcgttctcacgcttaacaaccggtttaccagagaacaaaaacttcagtaacgggatgcgcaaatgaatttcatacagaattatcgcaatccctactacaaatatcaggccacagagaaaaccaagccagttggaggtgatgtgcggtgtaatgtatgcgccgaaaaacagcgttaacgggtggtgaaccagatagataaacaggcttgcgttaacaaaataagtcacccgcgcactctggaagttaagcaaacggtggccaaaggagaagaccacattcaccatccacagaccgaggaccatggtgatcacgctctcggtttcgtacatccaggcatcgccactgccatagcgctggttgagtaaataagcgacaaacgccaatgctgctgcaagggtacagccacgagacggcgtggtaaacaaggctttaagatgagggaaaatgaaagccagtgcgccgaggataaagaacggcaaataaaacagcgtttgcatgacaataaaattgaacatgccattactcagaatgggcggatacacaataaaaatcgttcttcttattaccgcataaccgatgccgaggcataaaaaaatcacgcttagttttaccatgctgaattttttattcgttttatcagaattttctaaattatttctgatgcgcttaaatatccatacgcacagcgtcgtcatgaccactaacaccagtaaaaaccacaggtgacttattaattcccaggccaacgtattatatttgtcatacaaactcagcccaggccaactttccgcttttcctttgacatattgcagcataataaattgcggtaatgtcagtagggggatggctgttaacatcgggatacctacacgttcgacacgtactttccaccattttttcaagggatagcgtaaaaaaagcatgtaggaaaagtagccggatataacgaaaaatacctgcatgcggaagctgtggatgaagtcattaaaaagggtcagccacaaactactttcggcgctattcacatgccatgtatggctgctatagattaaagaaatatgaaaaggtatccctaacaacatcagccaggcgcggatggagtcgaggaaatattcacgttgcgcgggtactgggttcatatatggttaactaatctcggatttttcgtcttatccctgtcgggttatgcctttaggcttgttgccatagtgacaccgacctgaccgcgccaggcgcaggcttcaaggtttttatgcatagcatcatcgctaccactaaccagaatggaagcgtctgtaagacggttgataaataaatttgctggcaaaccctacacgaagtcgatgcttctgtctttaggagaagcacggaaagtgaaaacggttgcaatcaggtgcttaatccatgagccagcgtgctgaacgataccgggattctgttgtcggaatggctggttatccattaaaatagatcggatcgatataagcacacaaagggggaagtgcttactaattatgaaacataaactacaaatgatgaaaatgcgttggttgagtgctgcagtaatgttaaccctgtatacatctagtagctgggctttcagtattgatgatgtcgcaaagcaagctcaatctttagccgggaaaggctacgagacgcccaaaagcaacttgccctccgttttccgcgatatgaaatacgcggactatcagcagatccagtttaatcatgacaaagcgtactggaacaatctgaagaccccattcaaactcgagttctaccatcagggtatgtacttcgataccccggtcaaaataaatgaagtgactgccaccgcagtcaaacgaatcaaatacagcccggattatttcactttcggcgatgttcagcatgacaaagatacggtaaaagaccttggctttgccggttttaaagtgctttacccgatcaacagcaaagataaaaacgatgaaatcgtcagcatgctcggggccagctatttccgcgtgattggtgcaggtcaggtttatggcctttctgcccgcggcctggcaattgataccgccttgccaagcggtgaagaatttccgcgcttcaaagagttctggatcgagcgtccaaaaccgactgataaacgtttaaccatctatgcattgcttgacagcccgcgtgcgacaggtgcttacaaattcgtggttatgccagggcgtgacacggttgtggatgtgcagagcaaaatctatctgcgcgataaagtcggcaaactgggggttgcaccgttaaccagtatgttcctgtttgggccgaaccaaccgagccctgcaaataactatcgtccggagttgcacgactctaacggtctctctatccatgccggtaatggcgaatggatctggcgtccgttgaataacccgaaacatttagcggtcagcagcttctccatggaaaacccgcaaggctttggtctgttgcagcgcggtcgtgatttctcccgctttgaagatctcgatgatcgttacgatctccgtccaagcgcatgggtgactccgaaaggggagtggggtaaaggcagcgttgagctggtggaaattccaaccaacgatgaaaccaacgataacatcgtcgcttactggacgccggatcagctgccggagccgggtaaagagatgaactttaaatacaccatcaccttcagccgtgatgaagacaaactgcatgcgccagataacgcatgggtgcaacaaacgcgtcgtagtacgggggatgtgaagcagagcaacctgattcgccagcctgacggtactatcgcctttgtggtcgattttaccggcgcagagatgaaaaaactgccagaggataccccggtcacagcgcaaaccagcattggtgataatggtgagatagttgaaagcacggtgcgctataacccggttaccaaaggctggcgtctggtgatgcgtgtgaaagtgaaagatgccaagaaaaccactgaaatgcgtgctgcgctggtgaatgccgatcagacgttgagtgaaacctggagctaccagttacctgccaatgaataagacaactgagtacattgccgaagactgatatccgcgccgttcatcaggcgctggatgccgaacaccgcacctgggcgcgggaggatgattccccgcaaggctcggtaaaggcgcgtctggaacaagcctggccagattcacttgctgatggacagttaattaaagacgacgaagggcgcgatcagctgaaggcgatgccagaagcaaaacgctcctcgatgtttcccgacccgtggcgtaccaacccggtaggccgtttctgggatcgcctgcgtggacgcgatgtcacgccgcgctatctggctcgtttgaccaaagaagagcaggagagcgagcaaaagtggcgtaccgtcggtaccatccgccgttacattctgttgatcctgacgctcgcgcaaactgtcgtcgcgacctggtatatgaagaccattcttccttatcagggttgggcgctgattaatcctatggatatggttggtcaggatttgtgggtttcctttatgcagcttctgccttatatgctgcaaaccggtatcctgatcctctttgcggtactgttctgttgggtgtccgccggattctggacggcgttaatgggcttcctgcaactgcttattggtcgcgataaatacagtatatctgcgtcaacagttggcgatgaaccattaaacccggagcatcgcacggcgttgatcatgcctatctgtaacgaagacgtgaaccgtgtttttgctggcctgcgtgcaacgtgggaatcagtaaaagccaccgggaatgccaaacactttgatgtctacattcttagtgacagttataacccggatatctgcgtcgcagagcaaaaagcctggatggagcttatcgctgaagtcggtggcgaaggtcagattttctatcgccgccgccgtcgccgcgtgaagcgtaaaagcggtaatatcgatgacttctgccgtcgctggggcagccagtacagctacatggtggtgctggatgctgactcggtaatgaccggtgattgtttgtgcgggctggtgcgcctgatggaagccaacccgaacgccgggatcattcagtcgtcgccgaaagcgtccggtatggatacgctgtatgcgcgctgtcagcagttcgcgacccgcgtgtatgggccactgtttacagccggtttgcacttctggcaacttggcgagtcgcactactggggacataacgcgattatccgcgtgaaaccgtttatcgagcactgcgcactggctccgctgccgggcgaaggttcctttgccggttcaatcctgtcacatgacttcgtggaagcggcgttgatgcgccgtgcaggttggggggtctggattgcttacgatctcccgggttcttatgaagaattgccgcctaacttgcttgatgagctaaaacgtgaccgccgatggtgccacggtaacctgatgaacttccgtctgttcctggtgaagggtatgcacccggttcaccgtgcggtgttcctgacgggcgtgatgtcttatctctccgctccgctgtggtttatgttcctcgcgctctctactgcattgcaggtagtgcatgcgttgaccgaaccgcaatacttcctgcaaccacggcagttgttcccagtgtggccgcagtggcgtcctgagctggcgattgcactttttgcttcgaccatggtgctgttgttcctgccgaagttattgagcattttgcttatctggtgcaaaggaacgaaagaatacggcggcttctggcgcgttacattatcgttgctgctggaagtgcttttttccgtgctgctggctccggtacgcatgctgttccatacggtcttcgttgtcagcgcgttccttggctgggaagtggtgtggaattcaccgcagcgtgatgatgactccacttcctggggtgaagcgttcaaacgccacggctcacagctgctgttagggttagtgtgggctgttgggatggcgtggctggatctgcgtttcctgttctggctggcaccgattgtcttctcgttgatcctgtcaccgtttgtttcggtgatttccagccgtgccaccgttggtctgcgcaccaaacgctggaaactgttcctgatcccggaagagtattcgccgccgcaggtgctggttgataccgatcggttccttgagatgaatcgtcaacgctcccttgatgatggctttatgcacgcagtgtttaacccgtcatttaacgctctggcaaccgcaatggcgaccgcgcgtcaccgcgccagtaaggtgctggaaatcgcccgtgaccgccacgttgaacaggcgctgaacgagacgccagagaagctgaatcgcgatcgtcgcctggtgctgctaagcgatccggtgacgatggcccgtctgcatttccgtgtctggaattccccggagagatattcttcatgggtgagttattacgaagggataaagctcaatccactggcattgcgtaaaccggatgcggcttcgcaataaaaacgtagttgcctgatgcgctacgcttatcaggcctacatcgttcctgcaatttattgattttgcaagactttgtgggtcggataaggcgttcacgccgcatccggcaaaaacaacgagccaataaaaataccggcgttatgccggtatttttttacgaaagaggtatcaaatgcgtttaattgtggtgagcatcatggtgaccttgctgagtggctgtggcagcattattagtcgcactataccggggcaggggcatggcaaccaatattatcccggtgtgcaatgggatgtgcgtgactccgcctggcgttatgtcacgatccttgatctgccattctctctggtttttgatactttactgctgccgatcgacattcatcatggcccgtatgagtgattaacgttcatcccactcatcagctgctgcgcgtccttcctcggtatccagcggtggctcaagctgaaattccccctcgtcccattcatgtaatgtattctcttcctgccactcctggcgtatctctatctcatcatagtcgccatcaaaaacactttgcgcggcttcaccgctaagcataggtaaacattcaccttcttccccttcgtcggcaaaaaactcaacttgccacatgatgtcgccgtcctgcaaaacgtatttttgggcattgaactgttgcacattcgcatcttcggcgtcgatgccggggttgtctgcaagaaattcttcgcgtgcagcgtcaatggcttcttcaagcgttgcgtacatggtcatcacgattctccctttgagttgatgaggtttcagggaaaaggatagctgattctccgcttttgcaagtatgaaaggcgaaaaatcagttgcttacctggggtattcgacgacgacgtagactgttccaactatagactgcgttgaataacactacgccagcggtgacgagaaataccgctctgaaaccgtagttcgcactaatcgctgctcccatcaatggtccggtaacgttgccaatatcacgaaagctttggttatagctgaagatacgcccggcgatctggttgctgctgttgtaaaccaacagtgtctgtacggcggggagtagtgcaccatcggcggcaccgagcaaaaaacgtaaaatcccaagttgcaatggcgtctgaacgtaagacattgggatcaacagcagtacagaaaagatcagcgctgtaatcaggatcttttcgggtccgattcgatcgccaagtttgccgagtcgtggtgcacttagcagagccgccacgcctggcacgctggcgatcatgccactgataaaggcgacgttactgacgttacccgccagttcgcggacatacagcgtcagaatgggggcaatactgcccgtcgccacctggatgattaacgtagtgacaaacaggctgagtaccagtttcgggtttttaagacttgtcaccacttcccgcatgtgcagcatctcttttttgctgaccggctggaatttttctctgatgcaaaacagggtgacgaaaaagcagagtatgagcacactggcggtaataaagaataccggacgtaagccgtagctatcggcgagcaggccgccagccattgggccgagcaacgcaccactaacgccgcctgtggagagcgtacccagcgcccagccgcttttattacgcggtacttgtgtggcgataagagcattagcgttggggacaaatccgccaagtaacccaagaagcgcccgcaggatcaaaaactgccagatattttgtgccagccccatcaacaccatcacgatgcccatgccgagggcagagcgtaatagcatgagttttcggcctttacggtcggcgagtccaccccaaaacggactggcgatggcgctaaataaaaatgtaatgctgaagacaataccggaccacatattcagggcggagtgaccggtaacgccaagctgctcaacgtagaggggtaagaagggcattaccagactgaaggcggcaccggtaagaaaacagcctagccaggcgacgatcaggtttcgtttccagtttataggggtgtcattttcacagggactcatagcaatccgctgttggtgcgccaggcgcggtgaacataagaagaaaagataagcacactaattatgcgcccgacttccagggggcgcaatccagagagcttttatcgctaaatcagggggatttgctgtggtaatgccggatgccattctgaagcatccggcatgggagatttaatagcgactaggaacgccttccgggcgtgttttaaagcgacggtgtaaccacatatactgctctggtgccatcatgatgcatttttcgaccactttgttcatccacgcggcggtagtttcggcatcatccagtggcggagaacactctggcggcagcataatcaattgataccctttgccatctggcttacggcgtggaacgaagggcaccagacatgcgccggacatccgtgccagcatccaggttccggtcgtggtcgcagcctgctcaacggcaaacaacgggacgaaaacgctactgcgcgggccgtaatcatgatccggtgcgtaccagaccacttcgccttttttcagggctttaatcatgccttttaaatctttgcggtcgagcatgcttttattactgcgcaaacggccccaggtttgtagccagtcaatcagtggattatcgttcgggcgataaacgccaatacccggttcctgcataccaaactgccgcgcacccagctccagtgtcagaaaatggatgccaactaacaggatgccgcgtttttgcgcctgcacgtcacgaatgtgttccatgccgatcacttccgtccagcgggcgattcggcggtccggccagaaccacgccatgccggtttccatcaggcccatgccaacggattcgaaattcttcaccaccattttacggcgttcttgttcgctcatttccgggaagcacagttccaggttgcgatgcacaatttttgcgcgtcgtttcataaaacgtaacgccagttttcctaatccacaaccgaggcggtagataaccgggtagggcaattgcacgactaaccaaagtacgccaatacccaaccaggttaaccaataacgcggatgaagcagtgcggtggagaacttgggtagattcgtcatatcaatcctgtttttcaacctattcgggcaattgtatgtattgtcgcattttttcgcccgcaaccaaaatttgtggctgaagactgggcgaaattgccgcgcttgtaaataacaaataatttttaatgcgcaaatgtagcgtaaaatgtgtggatgttaattatcgataattgctatatcatgccgcggatttttactttcccatctcgcaggaaccgtacaccatgccagtgttacacaaccgcatttccaacgacgcgctaaaagccaaaatgttggctgagagcgaaccgcgaaccaccattagcttttacaagtatttccacatcgccgatcctaaggcgacccgtgacgctttatatcagctgtttaccgcgctgaatgtttttgggcgagtgtatctggcgcatgagggcattaacgcgcaaatcagcgtacctgcgagcaatgttgaaacatttcgcgcgcagctctatgccttcgacccggctttagagggtttacgcctgaatatcgcgttggatgatgacgggaaatccttctgggtactgcgcatgaaggtacgcgatcgcattgttgccgacggtattgacgatcctcactttgatgccagcaatgttggtgagtatctgcaagcggcggaagtgaacgccatgcttgacgatcccgatgcactatttatcgacatgcgtaaccactatgagtatgaagtggggcactttgaaaacgcgctcgaaattccggcagataccttccgtgagcagctgccaaaagcagtcgagatgatgcaggcacataaagataaaaaaatcgtcatgtactgcaccggcggcattcgttgtgaaaaggccagtgcctggatgaaacataacggattcaacaaagtctggcatatcgagggcggaattattgaatacgcccgtaaggcgcgcgagcagggcttgccggtgcgttttattggcaaaaattttgtttttgacgagcggatgggcgaacgtataagcgatgagattatcgcgcattgccaccagtgcggcgcgccgtgcgacagccataccaactgtaaaaatgatggctgccacctgctgtttattcagtgtccagtatgcgcggaaaaatacaaaggttgttgtagtgagatttgctgcgaagaaagcgcgttaccgccagaagaacagcgacgccgtcgggcaggacgtgaaaatggcaataagatctttaataagtctcgtggacgtctgaatacaacactgtgcattcctgatccaacagaataaatatcattgccggatgcgtgccatccggcaacatttcacgcttacttctgctgtacgccttccacactaataatcagatccacttcctgagaagctggacctaaatctgtcttgatattgaagtccttgagcttaattttgccttcggcctcgaagcctgcacgtttaccaccccatgggtcgtcgccctgaccaattaatttcgcttccagcgtgacgggtttggttacgccattcagcgtcagatcgccggtaatatccagttcgtcaccgtctttcttcacgctggtggaggtgaatgttgcctgtggatattttgcggtattgaggaaatctgcactgcgaagatgtttatcgcgttcggcgtgattagtatcgacgctggtggtgttaattgtcacattcactttatcggcagccggatttttttcgtcaaaggtaaaagtaccgtcgaaatctttaaaggtgccgtataaccagctatagccaaggtgctggatgcggaaattaacaaaggcgtgctgaccttctttgtcaattttgtaatcggcggcaaccgcactaccggcagagaacatcagggacgcgaaggttaaaccaagcaggctttttttcattttttatactccatagtcagaactgctctttcccagcatgcgcttcagagtgtcgtctttatcgatgaaatgatgcttcagggccataaatccgtgcataacggacagtactacgacgctccacgcgagccaaaaatgcagggcaccggcaaagtctgcctgtgcgccagcgtcggcaagggtcgcggggacgtcaaaccagccaaaaacgctgatcggtttaccatcggcagtactgatcagatagccgctgatgccgatggcgaaaagcaataggtacaatgcgagatgtccagctcttgcggcaagacgagtcatggggctataactcggcagcggacccggcggtggagatatgacacgccacagaacgcgaataaccagccccatcattaacaaaataccgatgcttttatgcagttcgggtgctttgtgataccagccatcgtaataactgagcgtgaccatccacagacctaaagcaaacatgccgtagacaataattgcgcttagccaatggaaggccgcagatataacaccatagcgttcaggggtatttgtgaaactcataagtgcatccaaaacgaatttgcgagagaaagaaaatggcgtgtcggagaatgaattgcaacacaaaaataacaaattgaatgatatttatttttatttcaataattttgaattaataatgaaagaatcttcataagtttagtgggttcagcatcagagatgtctggtgagtgctgtagaagcaggaataatctcattcaatttttcacgctaaatgaaagggagattaaatatttgtcagtttatgtcagtgcggaaaattaaaaataaaacacatagatcagatccataattgccaacaatccccagagaaaaagataaagcatcagatgctcgcgaatattattgatgagatagtgcaacagccgacgcattaaatactcctgtaaaaacggcctcattctggaggccgtaatgatgattattggaagcgggaaagcctgaatggcgtcaaatcaaaatcgctttttttgtcttgcgcaaaatcggcagctatttcccctaaaacactcgcaaatttaaaaccgtgcccactcaggccggtaatgagcagtgtattatcgtggccgggtagggtatcgataataaaatcttcgtcagggctattatcataggtgcaggcagcgccgtacaggcagcaaccgatacccggcaatacattgcgcaagaacgggaaggcttcactcccatcactggccacttccgcaaacggaacacgttcatccgcactatggataacctggcctccgttatgtttgccaatcttcaacgcgtcgttttctgccggaaaaccataatattgatcgccattgggcagttcaccggtaaacgccgggaatttattcttcacgctatagcggccatcggcctgataccaggcaaatactttgcgtacgggctggacaggcagctccgggagcaggtcttttacccatgttcccgcgcagacaatcgcttttttcgcctgatactcaccgtcagccgtttcaatagttacgccatcatcgtcatgacgaattgcggtgaccgggcagttgaacagttgcgcacagcccgcttccttcgccagttggatccaggttttaatcgccagttcgctgcgcaaaaaaccggaatcagtttcaaataagccgatgtagttgtccgggacgcgtatttccggccagcgggccataatcccttgcgcatcgagcttttcaacgttgagttgccattgttcggcgctgtgggcgacgttggcgagaaatgtggaatcagccgggccaaggttaatgacgccagagcgtacaaaaatgggatcttcttcgttgtggcgggagagttcatcccacagcgtttgcgcgcggaggaccagcgggacatacttttcgccttcaccataagcatggcgaattaatcgcgtatcgccgtggtggctgccgtgttgatgcggtggcatatgggcgtcggtcattagcacgtttaaaccggcgcgggttgcataatacccggcggcagcgcctacggaaccgctgccaataatgatgagatcgtatttcatttttttctctctgctctcatggtttaagcagagtaattaactgaatgcagatatacaacccagaaatggtaaaggcaccggtgaggtgccttttgggtggatggtcatgtcatgttaatgacgccgatactcgtttacctggaaatcaccggattcaattttggcgattcctgcttctaatatgctaataaattgtctggcaacatcagtggttaaccagagcgtctgaccaacttcagtcccttcctgctcggacttatttggggtctggtagtgcaaacgcaacatcagcgcatcatagctatcaacggtgctgatgtcccaccctacgagcggatgagtctgaatgacttcattatttttttccatcatggccccctaattcgtgttactagacaacgttattcgaggttcaatgcgtttttatctgaagcaacttcagtataccaataagtaagggtattcaccgaatttttaaagggggaaacagataaatttctgcttttaagatttatatgaacaataaaacagcatgtcattcatatttttttagcatattgtgcaattattttgaggaagtgtagaaattttgtactcaaaattcgtaagtaaaataaaaaagccggggcgacccggcaaaaaaaatcactgcatattattcgctgacaaaccagtcatcggcgctttcccacgtttcctggagaatttcactaatgcgctgtttatcttcttttgtcgcgccaataacgcttaaattattcgctgcggcataacgtacgcttacgtggccttcattatcaggaaacgcatactgaatacggcgggaaagttcgccagccagggcgtcaatagccccagctggcaatggagaagttttcgctatggtgacttcaattcgcataatagccccctgttgaatatactggttatttatacaggtaaaataacctaatgacaacaggaagctacgatttttattgtttaacggaccagcgtaccgtttccccggcgaggaatggcaccagcgtgtcatcagtcagtgcgatgctttcagcaacctgttgctcttcacgtaccagttcgatgaatgtgtcgttgaccggcaacccatagaactgcgggccgtttacagaacagaatgcttcaaagtgctgcaaagcattcatttcttcaaagacggtagcgtaactgcccagcgcggttggggcgttgaagcagcccgcgcagccgcaactgctctctttgcgatgacgtgcatgtggcgcagaatccgtaccgaggaatactcgattaaaaccgctggcgaccagttcacgcaatgcctgttggtgaatattacgtttgaggatgggtagacaatacaggtgcggacgcacgcctccaaccagcatatggttgcggttaaacatcagatgctgcggagtgatggtggcagccagccgttcatttccgtcacggacatagtcggcagcatctttggtggtgatgtgctcaaaaacgactttcagcgcagtcaggcgctggcgcagaggttccatcacgctttctataaagcgcgcttcacgatcaaaaatgtcgatatctgcatgtgtcacttcaccatgcaccagtagcggcataccgattttttccatgcgctcaagtaccggcatgattgcgtcaatactcgtcacgccgtggctggagttagtggttgcgtttgccgggtaaagttttgcagcggtgaacacgccttcgttaaatccgcgctccagctcattaggatccaggctatctgttaaataacaggtcatcaatggggtgaaatcgtgcccggcaggtacggcgtcaagaatacgctggcgatacgccacggcagcctcaacggtggtcacgggcggagccagattgggcattacgatagcccgtccataaatttcgctggtatatggcacgacagtttttaacatgtcgccatcgcggaggtgaaggtgccagtcgtctgggcggcggatctttaatacctgggatggtgcagtcattaatctctatgctccggctgaagggatgtttttgccggacacaaaggataagcggaaacgttttcctttgcacgaaaaataaagggcgcgaatgcgccctcgtgattaatcagtaaatggaatgacaatttcgcctggcttcacttcaatgcctttcgccagttttttcgccattgcttcgccctggctgccatcttcgcgcaggacgtaagcaggttgctggttaaagtaattgcgtaatgcctggttcaaatagggaagcaacgtttgcatcaccgtttgcattttttccggttgtaccgtcgcatcgaccacttccatctctttcaggaagatcgcacctttttctttatcaaacacgggcagcgctttcagcttcagtttcatggtcgctttctgactaccgaacagggagttcatgtccagattggcgtctccggttagggtaaccttattcggctcttcgcgaccaatttggctggtcaggtttgtcagaacaatatgggcgtcagccacgccgggtaaaccgatatctttactgaaattattatgtttcgcaaggctctggttaatttcttgttcggtgatggtgtattgggtgagttgattacagccaacgagcaggccactgacgatcaatgcagcggcaaataaaaacttgttcatggtagtcctcgacatgaaatctgcgtcaatatcctgacacaacgcagcatgtgtcaccagcgataaactcgccagcagaaaaaactgaaaacggcggcaacccgcgaatacaggctgccgcggcgggtcaggattaaatcgccatactacttaacaaattgatttgtgtctgtttcgccatattatcgcggtaatcagcaacgcggcttggccagttaattccggctaccagcgtcagattacgcagtagcgggaatagctgaatatcatcttcgctaagttcgccattcacggcgttcggtttgacgatcagtttgtccagcgcacgtaaatcatcgctgatattcttaatcagaccgtcagagtgggccagcaggtcggcaaaattacccgcgctggcctctttcttgtcgacgaaatatttgcgcgcggcgggagtagaaaactcatcaaatgcgcttttggcaaaacgcggcaacagcagtttgttggcgtagccattgaccttgcgcagccactcttcaatggcaggggaacgtttgccggtcagtaacggtttgccgtcgagtttatcgacatagtgaacgatgtccatgctttctggcatatagcggctgtcatctttttgcagaatgggaacctgtttttgaccgaccatccgggtgggtgtttctgcgtcgtcgttgagcagaacatgtaattcgacggggatatttttcaggccgaaaatcatgcgggctttgaggcagtaagggcagtgatcgtaaatgtatagcttcacgtgactcctccatttggctgtcagttcactttcagtatgaaggagtcaggggggagtatcaaatcaggcgtcgcgttcaagcaaacgacgcgcggcgcgtttctggctaaactgccaacccagcgcaaggaaagtgaagatgccaataatgcccagcatcatccacggaagctctggctggtgcgcgcttttgcccaggtcaaacagccagccgccaccgatataaccaatagcgccgccaatcgccagacccagacggctaaaccccatatagctgccgcgagctcttgcgtccgccaggctagcacttaaggtttcacgcgcaggctcggcaatgatgctcccgatataaaacagacaaatcagggtgaaaagttgttgcaggccgctgaccatgcccaccggcatcatgcttaaactcattatcaacagcccagccatcaaccggtgttccagacgaaaatgcttttcactccagcgggcgatagggtagagcaacgttaagctcagacacgcttcaatggcatacatccatttaacggcagagggcgcgcagccacgtcgttgaccataattggcagcatcagcatcacttgtacagccagcatgtagtaacccgccagcgtcagaacataggtgacaaaacgcttgtcacgcatcacgcgggtcatgccttcgcgaacgggcgtgcgtacggtggagagtttccatgctggtaacaaccacgcattgaacgccgcacatagcacaaatagaactgcccctgtggcgcagaccaggcgaaagtcgtattgcaacagccagctccccaacaatgcgccaatgaccgcaccggcactgtcctgcatcatcaacaggctgaaaaaacgaccacgctgctgtggacggattaatttcaccaccagcgcgctacgcggcggatcaaacaacgtgccaccgagtccgctgagcaggcaactaaaccacaatagccacggttcgtgggcgatacccattgtggcgaatccggcggcgcgcatcagcataccggtaacaatcatcggtttggcaccaaagcggtcggcaattgcaccgccgaaaatacccagaccttgctgaataaattggcgtagaccgagagcaataccgaccatgacggcggcccagcccatttgatcaacgaagcggatagagatcagcgggaagacaacaaagaaccccagcacgaccagcatattatcgatgagcaggaaatatttacccaggttcctcgcctggctcacgcgggacatttcccctcccgggaaataaaagatgagcactttctattctgcattgccgctaagacttttcccatcacttcggggacaatatttttttatcaaaacgtcgctttgatagagagtttttatcaaatatgtgaataatgcagaaaatggcattttggacttttcacagggtctggttgcgcaggtatagtaatacttacagcgtattaaagacgttacgggaaggagtaggtatagaatgtttggctatcgcagtaacgtgccaaaagtgcgcttaaccacagaccgactggtcgtgcgtctggtgcatgatcgtgatgcctggcgtcttgcggattattacgcagagaatcgccatttcctcaagccctgggagccagtgcgcgacgaaagccactgttatccaagtggctggcaggccaggctggggatgattaacgaatttcataaacaaggtagtgctttctactttggcttattcgacccggacgaaaaagagattattggcgttgccaatttttccaatgttgttcgtggctcttttcatgcctgctatctcggttatagcattgggcaaaaatggcagggcaaaggactcatgtttgaagccctgaccgcagccattcgttatatgcagcgcacccaacatattcatcgcattatggctaattatatgccgcacaataaacgcagcggtgatttactggcgcgactgggttttgaaaaagaaggctatgcgaaagactatctgttgattgatggacaatggcgcgatcacgtactgacggcattaactaccccagactggacgcccggccgctaaggagaatctcatgaaatatcaacttactgcccttgaagctcgcgtgattggttgcttgctggaaaagcaggtgaccacgccggagcaatacccgctcagtgtcaatggtgtagtcacggcctgtaatcagaaaacgaaccgtgaaccggtcatgaatctgagtgaatccgaagtgcaggaacagctggataatctggtcaaacgtcattatctacgcacagtgagcggttttggtaatcgggtcaccaaatatgagcaacgtttttgtaatagtgaatttggcgatctgaaactgagcgcagcggaagtggcgttaatcaccacgttgttattgcgtggtgcccagacgccaggtgaactgcgcagccgcgccgcgcgaatgtatgaattcagcgatatggcggaagtggagagcacgctggaacaactggcaaatcgcgaagatggtccttttgtggtgcgtctggcccgcgaaccgggtaaacgcgaaaaccgctacatgcatcttttcagtggtgaggttgaagatcagccggcggtgacggatatgagcaacgcggttgacggtgatttacaggcccgcgtcgaagccctggaaatcgaagtggcagaactgaaacagcgtcttgatagcttgctggcccatctgggagattaaagtgaaaaaattacgtatcggcgtagtgggattaggtggcattgcgcaaaaagcgtggttaccggtgctggcggcagcgtctgactggacgttacaaggagcctggagccctacgcgcgcgaaagccctgccaatttgtgaaagctggcgcattccttatgccgatagcttatccagccttgccgccagttgcgatgcggtttttgtgcattccagcaccgccagccactttgacgtggtcagtacgttactcaatgcgggggtacatgtctgtgtcgataaaccgctggcagaaaatctgcgcgatgctgaacggctggtggaactggcggcgcggaaaaaactgacgttgatggtcggttttaaccgtcgtttcgcaccactctacggtgagttaaaaacgcaactcgccaccgcagccagcctaagaatggataaacatcgtagcaatagcgtcgggccacacgatctttatttcacgttgctggatgattatctgcatgtggtggataccgcgctgtggttgagcggcggcaaagcctctctggatggcggtacgctactgactaacgacgctggcgaaatgctgtttgccgagcaccattttagcgctggtcctttgcagatcaccacctgtatgcatcgccgtgccggaagtcagcgtgaaaccgtgcaggccgtgactgacggtgcgctcatcgacattacggatatgcgcgaatggcgtgaggagcgcgggcagggcgtagtgcataaaccgattcctggttggcagagtacgcttgagcaacgtgggtttgtcggctgtgcgcggcacttcattgaatgtgtgcaaaaccagacagttccgcaaaccgccggcgaacaggccgtgctggcgcaacgtatcgttgacaagatctggcgcgatgcgatgagtgaataaaccctgtaacatctggcggtagcaattcaccataatccaggtagactattcgcctctttcagcgcctgccttgcaggcgttttgcccgtgggtctggattagaacaccgatgaatttattaaaaagcctggccgccgtcagcagcatgaccatgtttagccgtgtgcttggcttcgcacgagacgcaattgtcgccagaatctttggcgcagggatggcaaccgacgcctttttcgtcgcttttaaacttcctaacttgttacgccgtatctttgccgaaggggcattttcccaggcatttgtaccgattctggcggaatataaaagtaagcagggtgaagacgccacgcgggtctttgtctcttatgtttctggcctgctgacacttgcgctggcggttgtgacggtcgctggcatgctcgccgcaccgtgggtgatcatggtgaccgcgccaggcttcgctgacacagctgacaaatttgccctgaccagccagctactaaagattacctttccctatatcttgctgatctccctggcgagcctggtgggagcgattctgaatacgtggaaccgcttcagcattccggcgtttgctccaacactgcttaacatcagcatgattggtttcgcgctgtttgccgcaccgtactttaacccaccggtgctggcgctggcgtgggctgttacggtcggcggcgtcctgcagctggtgtatcagctaccgcacctgaagaagatcggcatgctggtcctgccgcgcattaacttccacgatgccggagcaatgcgcgtggtgaaacagatgggaccggcgatccttggcgtctctgtgagccagatctccttaatcatcaacaccatttttgccagctttcttgcttccggtagcgtgtcttggatgtattacgccgaccgcttaatggagtttccgtccggtgtgctgggcgtggcgcttggcaccattttgctgccgagcctgagcaaaagttttgccagtggcaatcatgatgaatacaaccgtttgatggactgggggttgcgtctttgtttcctgttggcgctgccgagtgcggttgcgttgggcattctttccggtccgttgaccgttagcctgttccagtacggtaaatttaccgcgtttgatgcgctgatgacccagcgggcgttaattgcctacagcgtgggtttgattggcctgattgtagtgaaagtgttggctcctggcttttattcccgccaggacattaaaacgccagtgaaaattgccatcgttacgctgattttaacgcaattgatgaacctggcgtttattggtccgttgaaacatgccgggctgagtctttctattggtctggcggcgtgtctgaatgctagcctgctttactggcagttgcgtaagcagaaaatctttaccccgcaacccggctggatggcgtttctgttgcgtctggtggtggcggtactggtgatgtctggcgtgcttttaggtatgttacatatcatgccggagtggagtttgggtaccatgccctggcgtttactgcgtttaatggcggtcgtgctggcggggattgccgcgtacttcgctgcactggcggtactgggcttcaaagttaaagaatttgcccgccggacggtgtaacaatgcattccggcctgcagtgttcgctttaaaacatatcatgaaactgggtatgttttgtctgcctgctctgggatcgctggggcgggcatttttttgcctattttgcattgttggttagcaaggatgccattcgatgaattttaatatgttgattcaaagatgaaataaaaaagccctggcagttaccagggcttgattactttgagctaattattactcaacaggttgcggacgcgcaggagcggcagaggcatgatgtgttgccgtatgaccacctgcggcacctttaccttcgaaggcaaaagtagggcgctgccagtcactgtgacgcggtgcctccggaacatattccggtgctggagcgcgcgtcattggcgcggtagcgtggttatgctcaacggtgacctcaggttcgaccgcagctaccgtttcaacttctgctgcgacttcagcgactactggcgcggcaggttgagcaacaacttcaggttcagcaactacaacctcagcagtttcgacaacttcttcaatatctgccgtctcttcctgcggttcaaccaccggttctgcttgttctgcaacttcctgggctacggcaacatcagactcggtaatcacctgcggctgttcagttaccgcggcagcgatcacttcaggatgcgtcgtttcaaccacttccggttgcggttcggcaacctgaacgggggcttctacgacaccggccacttcttcaacaactggcgcgctaacaaccggttcgatagcggcggcgacagggacctcagtcaccatcggctgcacatgtacttcttcctgttcgcgctgctcttcaacctgtacatcttgcggacgtacaattggatagcggatccagactttgccagaggccagttccggagacgcgcacgctacggtcaacggcattgggctctgggttggataacgctcgtcacgatagcgacgacgacgctgaccacttacgcgcaggtgacgagggctgcggcgagaacgacgcggcatgccaccgttgtcacggttatcagcattgttctcttcttgctgttctggtgcagtttgcgctacgactggcagcgggactttcaccagttctgtgcgtggagctggcgcttcctgaacaattggttcggcagcgacagtttcttcaaccaccggtgcgactaccgcttcttcggctacgctttgctcgtaacgcactttctgattgagctgacgctgtttacgacgcggctgaaccggacgtacacgttcttcctgttcggtttcctgaacagattgctcttcaacattcagcgccttcgcttcttgttgcgcctgacgtttatcatcattacggcggcggctacgttcacgacgcggcgcttgctgctcgtcggcggtacgcgctttttccgttacctcagcctgctgacggctctcacgcgtctcggcagtctgctgctgtgcctggcgacgattacgacggttttcttcgcgattatcgctgccttcagtacgttcactacgggtgtcgcggcgctcattacggtcacggcggttgttctgacgaggcttgcgacgatcctgttgacgttccggtttcgcttctgctttcggtgctggttgctcggtcggtttggtttcttcaccaccgctgaacagcgctttcagtgcgccgaagaagcggctcaacagcccaggttgtgcaggagctgctggtgttgccggtgcagctttcggtgctggagctacaacaggcgcggcaggttcagctggcgttggcgcaggcggcacatccggcatggcaaaggttgccagcgcaggttgttccggacgcttacgttcagcgaactcttcttcagacggcagcgccatcgcttcttcatgcagcttcggcagcatgtagcttaaggttggggtttcttcccctttacgcacgcgcagcacgtggtagtgcggggtttccatctgatcgtttggcacaattacacagcgcacaccgtcctgacgagtttcaatggcatttaccgcagaacgtttttcattcagcaggtaagaagcgattggcacaggaacaatggcgtgaacttcctgggtgttctctttcagcgcttcttcttcgatcagacgcagaatagagaggctcaggctttcgttgtcacgcacggtgccagtaccagaacaacgcggacaaacgtgatgactggattcacccagacttgggctcaggcgctgacgggacatttccagcaggccaaagcgagaaatatggctgatttgaatacgcgcacggtcctgacgcaccgcttcacgcagacggttttctaccgcacgctggtggcgtactggcgtcatgtcgatgaagtcgataacaatcaggccgccgaggtcacgcaggcgcagctgacgagcaatctcatcggcagcttcgaggttagtgttaaacgcggtttcttcgatatcgccgccgcgggtcgcgcgtgcggagttgatgtcgatggccgttaacgcttcggtgctgtcgataacaatggaaccaccagacggcagacgaacttcacgctggaaggcggactcgatctgactctcgatctggtagtggctgaacagcgggatctcgccggtgtacagtttgattttgctgctgaaatccgggcgacctaatgcagcgatatgctgacgtgccagttcgagcactttcgggttatcgataaggatttcgccgatgtcctgacgtaagtaatcgcggaatgcgcgaacgattacgttgctctcctgatgaatcaggaacggggccgggcggctttcagcggcttttttgatggcttcccagtgtttcagacggaagcttaaatcccattgcagcgcctcagcagatttgccgacgccagcggtgcgcacgataagccccatgccttccggcagttcaaggcttgccagtgcttcttttaattcggtacggtcgtcgccttcgatacggcgagaaatgccacccgcgcgcgggttgttcggcatcagaaccagatagctacccgccagactgataaaggtggttaatgccgcgcctttgttgccgcgctcttctttatcgatctgaacaatgacttcctgaccttcacgcaacacatctttaatgttgggacgaccatgagcactgtagttagcagggaaatattcgcgggcaatttcttttagtgggaggaaaccgtgacgttcagcgccgtaatcaacaaaagcagcttccagactcggttcaatgcgggtgattttacctttgtagatgtttgcctttttctgctcgtgccctggactttcgatatccaggtcatacagacgctgcccatctacaagggcaacgcgcaactcttcctgctgagttgcgttgattaacattcttttcatcgtaacttactcattattcttacattgacgactaagctgcgggcaaagtaacgcctttccgggtgtgaaccgatggcctcgtgtctagtcgcgtcgccaacctcacggttatcgtcagctcaaagaggcgcagagtgtgagttgcccgtttttcatgcggaaaaacagcgcaattatcaaagaaacagactgggtattactctccagaaatatttccatctaccggtaaggactgcaacccgcagcccgctaactgcctgaaagatcaatacgtcttacgccattgctgcgtggatgatcggtcgggcaaaatgggttattccgtaaaatttcttgttttaacaaggatggacacggaaacggcctcattattccactgcaagccttgttatagcaagatgacttttaccatttatcacccgcttactcacagttttttcacttcttgctggtgattggtttaataaccatcaataaagtgatcacgcagtgaagtaataaggtgcaaaagtaaatataagcatagaaaaatgagtggcgcgaatcctgttggctaattagaatcgccaaccatgaaaacagagactccatccgtaaaaattgttgctatcaccgctgacgaagcggggcaacgtatcgataactttttgcgtacccaattgaaaggcgtaccaaaaagtatgatttaccgtattttgcgtaaaggcgaagtgcgggtgaacaaaaaacgtattaagcctgaatataaactcgaagcgggtgatgaggtgcgtattccaccggttcgcgttgctgagcgggaagaagaggcggttagcccacatctgcaaaaggtggcggcgctggcggacgtcatcttatatgaagatgatcacatcctggtgctgaataaaccttccggtacggcggtacatggcggcagtggtttaagcttcggcgttattgaaggtttgcgggcgttgcgcccggaagcgcggttccttgaactggttcatcgtcttgaccgggacaccagtggtgttttgctggtagcgaaaaaacgcagcgcgttgcgttctctgcatgagcaattacgtgaaaaagggatgcaaaaagattacctggcgctggtgcgcggtcagtggcagagccatgtgaagagcgttcaagcaccgttactgaaaaatattctgcaaagcggcgaacgtatcgtgcgtgtgagtcaggaaggcaaaccgagcgaaacacgctttaaagtggaagaacgctatgcatttgccaccctggtgcgttgtagcccggtaacagggcgtactcaccagatccgtgtgcatacacaatatgcgggtcatccgattgcctttgacgatcgctacggtgaccgtgaatttgacaggcagctcactgaagcaggcacgggattaaatcgcctgttcctgcacgctgcagcgttgaagtttactcatccggggaccggtgaggtgatgcgtatcgaagctccgatggatgaaggtttgaagcgttgtttgcaaaagctgcgtaacgcgcgctaatacaagcatataaacctgataatgggcggttggcctgataaggcgtttacgccgcatcaggccgccagcaccgattgccggatgcgacgtaaccacatccggcgcaaaaaattatcccatcagcgggtttttcccttcccgacgtaacatctgacacagcgcgattagcggtaaaccaaccagcgtgttaggatcacgcccctctaaacgctcaaacagcgtaatgccaaatccttcactcttaaagctacccgcgcagtgcaggggatgctctttacgcacgtaattatcaatctccgcctcgctcaggtgacggaaatggacgtcaaaaggctccacttctgtttgcagatgcccattcgcgctattaaacaacgccagtccagtatagaaggtgacgatattgccgctggctttgcgtaattgcagacgggcattttcttccgttaacggtttaccggtgatttcgccatcaagaacacatacctggtcactaccaataattaaatgatccggataacgactcgccagagattgcgctttttcttgtgccagtcgaagcaccaactgtcgcggactttcgtcgctgcgtggggtttcgtcgacctctggtgctgcacattcaaaagagatttgcagtttttccagaagagcgcgacgccatgggctggtggaggctaaaataagtttaggcatatttttttccatcagatatagcgtattgatgatagccattttaaactatgcgcttcgttttgcaggttgatgtttgttatcagcactgaacgaaaataaagcagtaacccgcaatgtgtgcgaattattggcaaaaggcaaccacaggctgcctttttctttgactctatgacgttacaaagttaatatgcgcgccctatgcaaaaggtaaaattacccctgactctcgatccggttcgtacggctcaaaaacgccttgattaccagggtatctatacccctgatcaggttgagcgcgtcgccgaatccgtagtcagtgtggacagtgatgtggaatgctccatgagcttcgctatcgataaccaacgtctcgcagtgttaaacggcgatgcgaaggtgacggtaacgctcgagtgtcagcgttgcgggaagccgtttactcatcaggtctacacaacgtattgttttagtcctgtgcgtagtgacgaacaggctgaagcactgccggaagcgtatgaaccgattgaggttaacgaattcggtgaaatcgatctgcttgcaatggttgaagatgaaatcatcctcgccttgccggtagttccggtgcatgattctgaacactgtgaagtgtccgaagcggacatggtctttggtgaactgcctgaagaagcgcaaaagccaaacccatttgccgtattagccagcttaaagcgtaagtaattggtgctccccgttggatcggggataaaccgtaattgaggagtaaggtccatggccgtacaacagaataaaccaacccgttccaaacgtggcatgcgtcgttcccatgacgcgctgaccgcagtcaccagcctgtctgtagacaaaacttctggtgaaaaacacctgcgtcaccacatcactgccgacggttactaccgcggccgcaaggtcatcgctaagtaatcacgcatctgcgtgatgaagcttagtgaggattttccccaggcaactggggaaagaccaaaccgggcggcgacgataccttgacacgtctaaccctggcgttagatgtcatgggaggggattttggcccttccgtgacagtgcctgcagcattgcaggcactgaattctaatagccaactcactcttcttttagtcggcaattccgacgccatcacgccattacttgctaaagctgactttgaacaacgtagccgtctgcagattattcctgcgcagagtgttatcgccagtgatgcccggcctagccaagctatccgcgccagtcgtgggagtagtatgcgcgtggccctggagctggtgaaagaaggtcgagcgcaagcctgtgtcagtgccggtaataccggggcgctgatggggctggcaaaattattactcaagcccctggaggggattgagcgtccggcgctggtgacggtattaccacatcagcaaaagggcaaaacggtggtccttgacttaggggccaacgtcgattgtgacagcacaatgctggtgcaatttgccattatgggcagtgttctggctgaagaggtggtggaaattcccaatcctcgcgtggcgttgctcaatattggtgaagaagaagtaaagggtctcgacagtattcgggatgccagtgcggtgcttaaaacaatcccttctatcaattatatcggctatcttgaagccaatgagttgttaactggcaagacagatgtgctggtttgtgacggctttacaggaaatgtcacattaaagacgatggaaggtgttgtcaggatgttcctttctctgctgaaatctcagggtgaagggaaaaaacggagctggtggctactgttattaaagcgttggctacaaaagagcctgacgaggcgattcagtcacctcaaccccgaccagtataacggcgcctgtctgttaggattgcgcggcacggtgataaaaagtcatggtgcagccaatcagcgagcttttgcggtcgcgattgaacaggcagtgcaggcggtgcagcgacaagttcctcagcgaattgccgctcgcctggaatctgtatacccagctggttttgagctgctggacggtggcaaaagcggaactctgcggtaacaggacgctgccagcgaactcgcagtttgcaagtgacggtatataaccgaaaagtgactgagcgtacatgtatacgaagattattggtactggcagctatctgcccgaacaagtgcggacaaacgccgatttggaaaaaatggtggacacctctgacgagtggattgtcactcgtaccggtatccgcgaacgccacattgccgcgccaaacgaaaccgttagtaccatgggctttgaagcggcgacacgcgcaattgagatggcgggcattgagaaagaccagattggcctgatcgttgtggcaacgacttctgctacgcacgctttcccgagcgcagcttgtcagattcaaagcatgttgggcattaaaggttgcccggcatttgacgttgcagcagcctgcgcaggtttcacctatgcattaagcgtagccgatcaatacgtgaaatctggggcggtgaagtatgctctggtcgtcggttccgatgtactggcgcgcacctgcgatccaaccgatcgtgggactattattatttttggcgatggcgcgggcgctgcggtgctggctgcctctgaagagccgggaatcatttccacccatctgcatgccgacggtagttatggtgaattgctgacgctgccaaacgccgaccgcgtgaatccagagaatagtattcatctgacgatggcgggcaacgaagtcttcaaggttgcggtaacggaactggcgcacatcgttgatgagacgctggcggcgaataatcttgaccgttctcaactggactggctggttccgcatcaggctaacctgcgtattatcagtgcaacggcgaaaaaactcggtatgtctatggataatgtcgtggtgacgctggatcgccacggtaatacctctgcggcctctgtcccgtgcgcgctggatgaagctgtacgcgacgggcgcattaagccggggcagttggttctgcttgaagcctttggcggtggattcacctggggctccgcgctggttcgtttctaagataaggattaaaacatgacgcaatttgcatttgtgttccctggacagggttctcaaaccgttggaatgctggctgatatggcggcgagctatccaattgtcgaagaaacgtttgctgaagcttctgcggcgctgggctacgacctgtgggcgctgacccagcaggggccagctgaagaactgaataaaacctggcaaactcagcctgcgctgttgactgcatctgttgcgctgtatcgcgtatggcagcagcagggcggtaaagcaccggcaatgatggccggtcacagcctgggggaatactccgcgctggtttgcgctggtgtgattgatttcgctgatgcggtgcgtctggttgagatgcgcggcaagttcatgcaagaagccgtaccggaaggcacgggcgctatggcggcaatcatcggtctggatgatgcgtctattgcgaaagcgtgtgaagaagctgcagaaggtcaggtcgtttctccggtaaactttaactctccgggacaggtggttattgccggtcataaagaagcggttgagcgtgctggcgctgcctgtaaagcggcgggcgcaaaacgcgcgctgccgttaccagtgagcgtaccgtctcactgtgcgctgatgaaaccagcagccgacaaactggcagtagaattagcgaaaatcacctttaacgcaccaacagttcctgttgtgaataacgttgatgtgaaatgcgaaaccaatggtgatgccatccgtgacgcactggtacgtcagttgtataacccggttcagtggacgaagtctgttgagtacatggcagcgcaaggcgtagaacatctctatgaagtcggcccgggcaaagtgcttactggcctgacgaaacgcattgtcgacaccctgaccgccagcgcgctgaacgaacctagtgcgatggcagcggcgctcgagctttaaaagaggaaaatcatgaattttgaaggaaaaatcgcactggtaaccggtgcaagccgcggaattggccgcgcaattgctgaaacgctcgcagcccgtggcgcgaaagttattggcactgcgaccagtgaaaatggcgctcaggcgatcagtgattatttaggtgccaacggcaaaggtctgatgttgaatgtgaccgacccggcatctatcgaatctgttctggaaaaaattcgcgcagaatttggtgaagtggatatcctggtcaataatgccggtatcactcgtgataacctgttaatgcgaatgaaagatgaagagtggaacgatattatcgaaaccaaccttagttctgttttccgtctgagtaaagcggtaatgcgcgctatgatgaaaaagcgtcatggtcgtattatcactatcggttctgtggttggtaccatgggaaatggcggtcaggccaactacgctgcggcgaaagcgggcttgatcggcttcagtaaaagtctggcgcgcgaagttgcgagtcgcggtattactgtaaacgttgttgctccgggctttattgaaacggacatgacacgtgcgctgagcgatgaccagcgtgcgggtatcctggcgcaggttcctgcgggtcgcctcggcggcgcacaggaaatcgccaacgcggttgcattcctggcatccgacgaagcagcttacatcacgggtgaaactttgcatgtgaacggcgggatgtacatggtctgaccgcgatttgcacaaaatgctcatgttgcgcgcagtctgcgtggttatgagtaataattagtgcaaaatgatttgcgttattggggggtaaggcctcaaaataacgtaaaatcgtggtaagacctgccgggatttagttgcaaatttttcaacattttatacactacgaaaaccatcgcgaaagcgagttttgataggaaatttaagagtatgagcactatcgaagaacgcgttaagaaaattatcggcgaacagctgggcgttaagcaggaagaagttaccaacaatgcttctttcgttgaagacctgggcgcggattctcttgacaccgttgagctggtaatggctctggaagaagagtttgatactgagattccggacgaagaagctgagaaaatcaccaccgttcaggctgccattgattacatcaacggccaccaggcgtaagtgaacatctccaggcggtcgttcgaccgcctgagttttatctttttgtcccactagaatcattttttccctccctggaggacaaacgtgtctaagcgtcgtgtagttgtgaccggactgggcatgttgtctcctgtcggcaataccgtagagtctacctggaaagctctgcttgccggtcagagtggcatcagcctaatcgaccatttcgatactagcgcctatgcaacgaaatttgctggcttagtaaaggattttaactgtgaggacattatcagccgcaaagaacagcgcaagatggatgccttcattcaatatggaattgtcgctggcgttcaggccatgcaggattctggccttgaaataacggaagagaacgcaacccgcattggtgccgcaattggctccgggattggcggcctcggactgatcgaagaaaaccacacatctctgatgaacggtggtccacgtaagatcagtccattcttcgttccgagtacgattgtgaacatggtggcaggtcatctgactatcatgtatggcctgcgtggcccgagcatctctatcgcgactgcctgtacttccggcgtgcacaacattggccatgctgcgcgtattatcgcgtatggcgatgctgacgtgatggttgcaggtggcgcagagaaagccagtacgccgctgggcgttggtggttttggcgcggcacgtgcattatctacccgcaatgataacccgcaagcggcgagccgcccgtgggataaagagcgtgatggtttcgtactgggcgatggtgccggtatgctggtacttgaagagtacgaacacgcgaaaaaacgcggtgcgaaaatttacgctgaactcgtcggctttggtatgagcagcgatgcttatcatatgacgagtccgccagaaaatggcgcaggcgcagctctggcgatggcaaatgctctgcgtgatgcaggcattgaagcgagtcagattggctacgttaacgcgcacggtacttctacgccggctggcgataaagctgaagcgcaggcggtgaaaaccatcttcggtgaagctgcaagccgtgtgttggtaagctccacgaaatctatgaccggtcacctgttaggtgcggcgggtgcagtagaatctatctactccatcctggcgctgcgcgatcaggctgttccgccaaccatcaacctggataacccggatgaaggttgcgatctggatttcgtaccgcacgaagcgcgtcaggttagcggaatggaatacactctgtgtaactccttcggcttcggtggcactaatggttctttgatctttaaaaagatctaagttgtcattttccacccttataaaaggtccgcttgcgggccttttttcttagcttttattccgacttgttccgtagtgaacatgctgccacactaacaattctctgataaggagccggtatgttcttaattaacggtcataagcaggaaagcctggcagtaagcgatcgggcaacgcagtttggtgatggttgttttaccaccgccagagttatcgacggtaaagtcagtttgttaagcgcgcatatccagcgactacaggatgcttgtcagcggttgatgatttcctgtgacttctggcctcagcttgaacaagagatgaaaacgctggcagcagaacagcaaaatggtgtgctgaaagtcgtgatcagtcgcggtagtggcgggcgagggtacagcacattgaacagcggaccggcaacgcggattctctccgttacggcttatcctgcacattacgaccgtttgcgtaacgaggggattacgttggcgctaagcccggtgcggctggggcgcaatcctcatcttgcaggtattaaacatctcaatcgtcttgagcaagtattgattcgctctcatcttgagcagacaaacgctgatgaggcgctggtccttgacagcgaagggtgggttacggaatgctgtgcggctaatttgttctggcggaagggcaacgtagtttatacgccgcgactggatcaggcaggtgttaacggcattatgcgacaattctgtatccgtttgctggcacaatcctcttatcagcttgtcgaagtgcaagcctctctggaagagagcttgcaggcagatgagatggttatttgtaatgcgttaatgccagtgatgcccgtatgtgcctgtggcgatgtctcctttagcagtgcaacgttatatgaatatttagccccactttgtgagcgcccgaattaatcatgaaaaaagtgttattgataatcttgttattgctggtggtactgggtatcgccgctggtgtgggcgtctggaaggttcgccatcttgccgacagcaaattgcttatcaaagaagagacgatatttaccctgaagccagggaccggacgtctggcgctcggtgaacagctttatgccgataagatcatcaatcgtccacgggtttttcaatggctgctgcgtatcgaaccggatctttctcactttaaagccgggacttaccgctttacaccgcagatgaccgtgcgcgagatgctgaaattgctggaaagcggtaaagaagcacagttccctctgcgactggtagaagggatgcgtctgagcgattacctcaagcaattgcgtgaggccccgtatatcaagcatacgctgagcgatgataagtacgccaccgtagcgcaggcacttgaactggaaaacccggagtggattgaaggttggttctggccagacacctggatgtataccgccaataccaccgatgtcgcgttactcaagcgagcgcacaagaaaatggtgaaagcggtcgatagcgcctgggaagggcgtgcggacggtctgccttataaagataaaaaccagttggtgacgatggcaagtattatcgaaaaagaaaccgccgttgccagtgaacgcgataaggttgccagtgtatttatcaaccgtttacgcattggtatgcgcctgcagaccgacccgaccgtgatttacgggatgggagagcgttataatggcaaactttctcgtgcagacctggaaacgccgacagcgtataacacctataccattaccggtctgccgccaggtgcgatagcgacgccgggggcggatagcctgaaggctgctgcgcatccggcaaaaacgccgtatctctattttgtggccgatggtaaaggtggtcacacgtttaataccaatcttgccagtcataacaagtctgtgcaggattatctgaaagtgcttaaggaaaaaaatgcgcagtaagtatatcgtcattgaggggctggaaggcgcaggcaaaactaccgcgcgtaatgtggtggttgagacgctcgagcaactgggtatccgcgacatggttttcactcgggaacctggcggtacgcaacttgccgaaaagttaagaagcctggtgctggatatcaaaagcgtaggcgatgaagtcattaccgataaagccgaagttctgatgttttatgccgcgcgcgttcaactggtagaaacggtcatcaaaccagctctggctaacggcacctgggtgattggcgatcgccacgatctctccactcaggcgtatcagggcggcggacgtggtattgaccaacatatgctggcaacactgcgtgatgctgttctcggggattttcgccccgacttaacgctctatctcgatgttaccccggaagttggcttaaaacgcgcgcgtgcgcgcggcgagctggatcgtattgagcaagaatctttcgatttctttaatcgcacccgcgcccgctatctggaactggcagcacaagataaaagcattcataccattgatgccacccagccgctggaggccgtgatggatgcaatccgcactaccgtgacccactgggtgaaggagttggacgcatgagatggtatccatggttacgacctgatttcgaaaaactggtagccagctatcaggccggaagaggtcaccatgcgctactcattcaggcgttaccgggcatgggcgatgatgctttaatctacgccctgagccgttatttactctgccaacaaccgcagggccacaaaagttgcggtcactgtcgtggatgtcagttgatgcaggctggcacgcatcccgattactacaccctggctcccgaaaaaggaaaaaatacgctgggcgttgatgcggtacgtgaggtcaccgaaaagctgaatgagcacgcacgcttaggtggtgcgaaagtcgtttgggtaaccgatgctgccttactaaccgacgccgcggctaacgcattgctgaaaacgcttgaagagccaccagcagaaacttggtttttcctggctacccgcgagcctgaacgtttactggcaacattacgtagtcgttgtcggttacattaccttgcgccgccgccggaacagtacgccgtgacctggcttagtcgcgaagtgacaatgagtcaggatgcattacttgccgcattgcgcttaagcgccggtagccctggcgcggcactggcgttgtttcagggagataactggcaggctcgtgaaacattgtgtcaggcgttggcatatagcgtgccaagcggcgactggtatagcctgctagcggcccttaatcatgaacaagctccggcgcgtttacactggctggcaacgttgctgatggatgcgctaaaacgccatcatggtgctgcgcaggtgaccaatgttgatgtgccgggcctggtcgccgaactggcaaaccatctttctcccagccgcctgcaggctatactgggggatgtttgccacattcgtgaacagttaatgtctgttacaggcatcaaccgcgagcttctcatcaccgatcttttactgcgtattgagcattacctgcaaccgggcgttgtgctaccggttcctcatctttaagagagacatcatgtttttagtcgacagtcactgccatctcgatggtctggattatgaatctttgcataaggacgtggatgacgttctggcgaaagccgccgcacgcgatgtgaaattttgtctggcagtcgccacaacattaccgggttatttacatatgcgggatctggtaggcgaacgtgacaacgtcgtattttcttgtggcgtgcatccactcaaccagaatgatccctacgatgtagaagatttacgccgtctggcggcagaagagggtgttgtagcgctgggtgaaaccgggctggattattattacacgccggaaactaaagtacgtcagcaagagtccttcatccatcatatccagattggtcgtgaactgaacaagccggttatcgtccatacccgtgacgcccgtgccgatacgctggcaattctgcgcgaagaaaaagtgacggattgcggtggcgtactacactgttttacagaggacagagaaacggcgggtaaattactggatctcggattttacatctccttttccggcattgtgaccttccgtaatgcggagcaactgcgcgatgctgcgcgttatgtccccctggatcggttactggtggaaactgacagtccttaccttgcgccggtaccgcatcgaggaaaagagaatcaacctgcgatggttcgtgacgttgcagaatacatggctgtgttgaaaggtgttgccgttgaagaactggcgcaggtaaccaccgataacttcgcccgtctgtttcacatcgacgcttcccgccttcaatccatccgttgaatgagtttttttaaagctcgtaattaatggctaaaacgagtaaagttcaccgccgaaaattgggcggtgaataaccacgtttgaaatattgtgacatatgttttgtcaaaatgtgcaacttctccaatgatctgaagttgaaacgtgatagccgtcaaacaaattggcactgaattattttactctgtgtaataaataaagggcgcttagatgccctgtacacggcgaggctctccccccttgccacgcgtgagaacgtaaaaaaagcacccatactcaggagcactctcaattatgtttaagaatgcatttgctaacctgcaaaaggtcggtaaaagcctgatgctgccggtatccgtactgcctatcgcaggtattctgctgggcgtcggttccgcgaatttcagctggctgcccgccgttgtaagccatgttatggcagaagcaggcggttccgtctttgcaaacatgccactgatttttgcgatcggtgtcgccctcggctttaccaataacgatggcgtatccgcgctggccgcagttgttgcctatggcatcatggttaaaaccatggccgtggttgcgccactggtactgcatttacctgctgaagaaatcgcctctaaacacctggcggatactggcgtactcggagggattatctccggtgcgatcgcagcgtacatgtttaaccgtttctaccgtattaagctgcctgagtatcttggcttctttgccggtaaacgctttgtgccgatcatttctggcctggctgccatctttactggcgttgtgctgtccttcatttggccgccgattggttctgcaatccagaccttctctcagtgggctgcttaccagaacccggtagttgcgtttggcatttacggtttcatcgaacgttgcctggtaccgtttggtctgcaccacatctggaacgtacctttccagatgcagattggtgaatacaccaacgcagcaggtcaggttttccacggcgacattccgcgttatatggcgggtgacccgactgcgggtaaactgtctggtggcttcctgttcaaaatgtacggtctgccagctgccgcaattgctatctggcactctgctaaaccagaaaaccgcgcgaaagtgggcggtattatgatctccgcggcgctgaccagcttcctgaccggtatcaccgagccgatcgagttctccttcatgttcgttgcgccgatcctgtacatcatccacgcgattctggcaggcctggcattcccaatctgtattcttctggggatgcgtgacggtacgagcttcagccacggtctgatcgacttcatcgttctgtctggtaacagcagcaaactgtggctgttcccgatcgtcggtatcggttatgcgattgtttactacaccatcttccgcgtgctgattaaagcactggatctgaaaacgccgggtcgtgaagacgcgactgaagatgcaaaagcgacaggtaccagcgaaatggcaccggctctggttgctgcatttggtggtaaagaaaacattactaacctcgacgcatgtattacccgtctgcgcgtcagcgttgctgatgtgtctaaagtggatcaggccggcctgaagaaactgggcgcagcgggcgtagtggttgctggttctggtgttcaggcgattttcggtactaaatccgataacctgaaaaccgagatggatgagtacatccgtaaccactaatccgtaagacgttggggagactaaggcagccagatggctgccttttttacaggtgttattcagaattgatacgtgccggtaatgctgaaattacgcggtgtgccgtagacgatagaaccttccacgttggtatcgtaggttttgtcgaacaggttattgacgttcccctgtaagctgaagtttttcgtcacctggtagcgggtgaagagatccaccagcgcgtagctaccttgctcggcgcggaaggtgccatacggcgtcacggtgtcggtatacacgcgattttgccagttaacaccaccgccgaccgtcaactctggcatgacaggcaaccgatagctggtgaacattttaaccgtggtgcgtggcagattaggattaacggcgtttccttcgttatcctctgcaatatagcgcgttgcgccaaatgtcagctgccagttgtcggtaattgcgccgttgagttcaaattccacccctttactgactgtcccatccaccgctttataggcggtttcgccgttgctgccggggataggtgtaccggtggactgagcgacattatcctgctcaatacggaagatggctaacgtggtggtcagacggctattcatccagtcgcttttcagacccagctcgtagttgttaccggtgattggagccagatatttgccactactgtcacgatcattttgcggctggaaaatagaggtatagctggcgtaggtgctccagttgtcattgatgtcaaacaccagaccagcgtaaggcgtggtgtggtttttctccatgctgtaagtcagcgtatcaacccgccagttggtataacgtgcgccgaggatcagatgcagcggatcggcaagggtgacacgagtggcagcatataagcttttcatatgtgtggtatcgtcctgcgccaggctctgtggactccagtcggtttgtgggaaattgccattaaagttgtagaaactgccaatttcatccgggaagatgttggcccaactactgaagtaacgattgttttgtttgctgtaactgccaccaaacattagattgtgctgacgaccaaacaattcataactaccgtcagcgaacaaatccagcgcatcaactttacgtttgccactgttccaaccggtgccgccgacataatcaaagccaggtccataattactgtatggcccaaccagcataccatccgctttgtttacataggcatcgacatacatcattttgctgtcaaattcgacttcagagtgggtggcattcagtgtcgcttgccaggtatcagcaaactgctgcttcagggtcataaagaccttgttgatctctttatcgttgtacgcccagtcaggtgcggtactgcgtgcgcgatcgtaactgttgctgctgccatcagtattccagcgcggtaaaccgccccaggtagggctattaacatcaatgcgctgatattcgtaaccggcactaagcgtcgtaagatcgcctaaatcagcatcgacaatgccgctgaagaaggtcttttcactgttgtagcggtccagccaactgtcgttattctggtagccgccgacaattcgcgcgcggattttaccgtcttcggtgagtgggctttgtaaatccgccacataccgttctttgttccagctaccgtattccgcgctgacatcgcctttaaattcacgactggtcgcgtgttttcgaaccatattaattgccgcagatggattacccgtcccggtcatgagtcctgtcgcgccacgcactacttctacgcgttcaaagagtgccatatcagaaagtgcgtcgcccagattccagcggctttcaaaataggtggggataccatcaaccatatagttatcgatctggaatccgcgggaataataaagagcacgatcggaatccgcctgacttttgctgatccccagcgtgttttccatcacttcgcccagcgtttgtaactgctgatcttccatccgctgctggctaacaatagtgacgctctgaggaatatcacgttgagtcatctgcattttggtacccgcagaggtagacgttacgctgtaatcattttcgccatcatctggagctgtggcactaccctcaacaatcaccgtttcttcagtggctggtgcagcaaaagcggcagaaggtaatagtgccagtgctatgcaaccggcaagtagactcggtttggtgatggcttgatattgattatccctgttaaattgtgtactaagcatttgaaatctcttggtttatgttgtcgtcaggctcatgccggaggagggtgatgagcgattatatttagtgtgcgaataattttgtttgtaaatgcaaatgagaaatatacgcattcatatttgtcatgtaaaccaaacagagaatgtcttttcagcgcattcgcaggcagaaatgggaataatggcgatatatacggcagcaaaacgattttttgcttaagaaatcgtgagttaaggttgaaagagcaggtttaactcgaccatactctatactcgcagtgtggcgcggcgtagcatggcgcaacgcatggctatttgaaaaaggaaaatgtcgtggcagaagaaactatattcagcaaaattattcgtcgtgagatcccctccgatatcgtctaccaggatgatctggtaacggcgtttcgcgatattagcccgcaagcgccaacgcatattctgatcattccgaatatcctcattccgactgtgaacgacgtcagtgctgagcatgagcaggcgctgggacgcatgatcaccgtagcggcaaaaattgctgagcaagaaggtattgccgaagatggctatcgtctgatcatgaataccaaccgccatggcggacaagaggtttaccacatccatatgcacttgttgggtggccgtccgctgggaccaatgctggcgcataaaggtctgtaacgatgagaaaaggatgctttgggctggtgtctctggtgttgttactgctggtgggctgtcgtagtcatccggaaattccggtgaatgatgagcaaagcctggtgatggagagttctttattggctgcgggcatcagtgcagaaaagcccttccttagcacgtctgatattcaacctagtgcatccagtacgctttataacgaaaggcaagaacccgttaccgttcattatcgtttttactggtatgacgccagagggctggagatgcatcctctggaaaggccacgcagcgttaccattcccgcacatagcgcggtaacgctgtacggcagcgccaattttctgggggcgcacaaagtcagactttatctatatttgtaaggggtgaatcttgatgacaaaaatgagtcgctacgccttgattaccgcgctggcgatgtttctcgccgggtgtgtggggcaacgtgaacctgcaccggtagaagaagtgaaaccagcgccggaacaaccagccgagccacaacagcctgtccccacagtgcccagcgtgccgacgatcccgcagcagccaggcccaattgagcacgaagatcaaactgcaccgcctgcgccgcatattcgccattatgactggaatggcacaatgcagccgatggtcagtaagatgcttggggctgacggggtgactgcgggtagcgtcctgctggttgatagcgttaacaaccgtactaacggtagcctgaatgccgcagaagcgaccgaaacgctgcgaaatgcgctggctaataacgggaaatttaccctggtttccgcccagcaactgagcatggcgaagcaacagttaggtttgagcccgcaggacagtttaggcacccgtagtaaagccataggcattgcccgcaatgtcggcgctcattacgtgctgtactccagcgcctctggcaacgttaacgctccgaccctacaaatgcagctgatgctggtgcagacgggcgaaattatctggagtggtaaaggtgccgttagccagcaataagtaaaattatctggtcaggtaaaggtgccgtttcgcagcaataatcccatcacgcgcgacgaattgctgagccgctttttcccgcagtatcatcccgtcacgacgtttaatagtgggcttagtggcgggagttttctcattgaacatcagggccagcgttttgttgtgcgtcagccgcacgatcctgatgcgccgcagtccgcgttcttgcgccagtatcgggctttaagtcaactacccgcatgcattgcaccgaagccgcatttatatctccgtgactggatggtagtcgactatctgcccggcgcggtaaaaacgtatttgccggataccaacgaactggcaggcttgctgtattatctacatcaacaaccacgttttggctggcgaataacgctgttgccgttactggaactgtactggcagcaaagcgatccggcgcggcggacagtgggttggctgcgaatgttaaaacgtctgcgcaaagcgcgggaaccacggcctttacgcttaagtccattgcatatggatgtccacgccggaaatttagtgcatagcgcgagtgggttaaaactcatcgactgggagtatgccggagatggtgatatcgcgctggaactggcggcggtgtgggtggaaaatactgaacagcaccggcaattggtcaatgactatgccactcgcgcgaagatttatccggcgcaattatggcgtcaggtcaggcgatggtttccctggctgctgatgctcaaagcagggtggtttgagtaccgctggcgacaaaccggcgatcaacaatttatcaggctggccgatgacacctggcggcagctattaataaaacaataaggagagcagtgtgggtccagtaatgttggatgtcgaaggttacgaactggacgcggaagagcgtgaaatactggcgcatccgctggtgggagggctgattctctttacgcgtaactatcatgatcctgcccagttacgtgaactggtgcgccagatccgcgcagctagccgcaatcgtctggtggtggcggttgatcaggaaggtggacgcgtgcagcgttttcgtgaaggttttacccgcttgccagcggcgcaaagtttcgctgcgctgagtggaatggaagagggtggcaaactggcgcaggaggcaggttggttgatggccagcgaaatgatcgctatggatattgatatcagctttgcgcctgtgctggatgtcgggcatatcagcgcggcgattggcgagcgttcttatcatgccgatccacaaaaagccctggcaattgccagccggtttattgatggtatgcatgaagccggaatgaaaacgaccgggaaacacttcccaggacacggtgcagtaacggcagacagtcacaaagaaacaccgtgcgatccacgtccacaagcggagattcgcgctaaagatatgagcgtcttcagttccttaatccgcgaaaataaactcgacgccattatgcctgcgcatgtgatctacagtgatgttgatccgcgtccggcgagcggttctccctactggctgaaaaccgttttgcgtcaggaactgggttttgacggcgtgattttctctgacgatttaagcatggaaggtgccgcgattatgggcagttatgccgaacgcgggcaggctagtctggatgcgggttgcgatatgatcctggtctgcaataatcgtaaaggggccgtcagcgtgttagataatctgagtccgatcaaggcagaacgtgttacacgtttgtatcataaaggtagttttagccgacaggaactgatggacagcgctcgctggaaagcgatcagcacccgtctgaatcagttacatgaacgctggcaggaagagaaagcaggtcactaaccctggcttatgtgaggaagcgatgattatctatttacacggttttgactctaacagtccgggtaaccacgagaaagtcttacaattgcagtttattgacccggatgtacgcttgataagctacagtacgcggcatccgaaacatgatatgcagcatctgcttaaagaagtggacaaaatgttgcaactgaacgttgacgagcgtccgctaatttgcggcgttggcttgggcggatactgggcggaacggattggttttctttgcgacatccgccaggtgatcttcaaccctaatttgttcccttatgagaacatggaaggcaagattgatcgcccggaagagtatgccgatattgccactaagtgtgtgaccaacttccgtgagaagaatcgcgatcgttgcctggtgattttgagccgtaatgatgaagcgcttaacagccagcggacatctgaagagttgcatcattattacgagattgtctgggacgaagagcagacgcacaaattcaagaatatctccccgcatttacagcgcattaaagcgttcaaaaccctcgggtaaatgccctcgtcgcatcaggtaaccttgccggtacctgatgcgctccgaattctgtgggtcggataaggcgtccacgccgcatccgacagtcgagcatcaatgcctgatgcgcttcttatcaggcctaccgaacgccctgcatacacccctcactctatatcactctcacaaattcgctcaaataataaacaataaactctgttttttgatctcacccggtaaagtcgcctatcttttcagcaacaaaacttgattaacatcaattttggtatgaccaatgcaccattcatgttattctcaatagcgaagaacattttcattgctgtaacctgttgttaattaagagctatgttaataaccattaattaacaattggttaataaatttaagggggtcacgttgactacgccattgaaaaagattgtgattgtcggcggcggtgctggtgggctggaaatggcaacacagctggggcataagctgggacgcaagaaaaaagccaaaattacgctggtcgatcgtaaccacagccacctgtggaaaccgctgctgcacgaagtggcgactggcagccttgatgaaggcgtcgatgcgttgagctatctggcccatgcgcgcaatcatggtttccagttccagctgggttccgtcattgatattgatcgtgaagcgaaaacaatcactattgcagaactgcgcgacgagaaaggtgaactgctggttccggaacgtaaaatcgcctatgacaccctggtaatggcgctgggtagcacctctaacgatttcaatacgccaggtgtcaaagagaactgcattttcctcgataacccgcaccaggcgcgtcgcttccaccaggagatgctgaatttgttcctgaaatactccgccaacctgggcgcgaatggcaaagtgaacattgcgattgtcggcggcggcgcgacgggtgtagaactctccgctgaattgcacaacgcggtcaagcaactgcacagctacggttacaaaggcctgaccaacgaagccctgaacgtaacgctggtagaagcgggagaacgtattttgcctgcgttaccgccacgtatctctgctgcggcccacaacgagctaacgaaacttggcgttcgcgtgctgacgcaaaccatggtcaccagtgctgatgaaggcggcctgcacactaaagatggcgaatatattgaggctgatctgatggtatgggcagccgggatcaaagcgccagacttcctgaaagatatcggtggtcttgaaactaaccgtatcaaccagctggtggtggaaccgacgctgcaaaccacccgcgatccagacatttacgctattggcgactgcgcgagttgcccgcgtccggaagggggctttgttccgccgcgtgctcaggctgcacaccagatggcgacttgcgcaatgaacaacattctggcgcagatgaacggtaagccgctgaaaaattatcagtataaagatcatggtagcctggtaagcctgagcaacttctccaccgtcggtagcctgatgggtaacctgacgcgcggcagtatgatgattgaaggacgaattgcgcgctttgtatatatcagcctataccgaatgcatcagattgcgctgcatggttactttaaaaccggattaatgatgctggtggggagtattaaccgcgttatccgtccgcgtttgaagttgcattaatcgacgtacactggcggatgtggcataaacgcctcatccgcccttgaggaacagcgcgatcggcagccgcgttgtatcaggcatcctttcagactcctccgaatccttaagtatttccagccattcccgcgcttttcatcttctgtctgatagctgcttttctccttcgcttgcatgattggcataactgcaaagaaggaggtgttcccgtgaataaaagtatgttggcgggtatcgggattggtgtcgcagctgcgctgggcgtagcggcagtggccagtctgaacgtgtttgaacggggcccgcaatacgctcaggttgtttctgcaaccccaatcaaggaaacggttaaaacaccgcgtcaggagtgtcgcaacgtcacagtgacccatcgtcgaccggtgcaggatgaaaatcgcattaccgggagcgtgctcggcgctgttgctggcggcgtgatagggcatcagtttggtggtggtcgcggtaaagatgtcgccactgttgtgggggcgctgggtggtggatatgccggtaaccagatccagggctctctccaggaaagcgatacttacacgactacgcaacagcgttgtaaaacggtgtatgacaagagtgaaaaaatgctcggttatgatgtgacctataagattggcgatcagcagggcaaaatccgcatggaccgcgatccgggtacgcagatcccgctagatagcaacgggcaactgattttgaataacaaagtataacaaggctgtactctgcaatttggcccctcattcgctcaggctgaggggctttttttgcgacttatttcaccagttcgggccataaacgcaaagtcgttccggcaatctgcatcagtttttccaggcttgcaccttcgcgtgcgctgatgctcatcccctgaataatacaattaaggaattctgccagatgtgtcacgtcacagtggggcgggatttccccgcgcgcttgtcgttgacataaaaactgctgcaaagtgcgctcttgcatcgcatggcgacttttcaacgtattggcgatatctccactatctggggagagggtggtgcagttgttgatcatgaagcagcctgccggggtgtctttgctggtaaagcagttggcgatggcagcaaaatagtcagccagcgcagactccacgcttttctcttcacaaaacagctgtgcttcatgcttagcggcaaaacgatcgatatagcggtcgagaacggcacgaaataacccctctttgttggtaaattccgcgtatagcgtgggcgctttggctccggtcgcttcgacgaggtccgcaagagaagtcgcttcataaccgtgttgccagaacaatttcatggccttatcaagcgcggcatccctgtcgaacacttttgggcggccacggcttttttttacacattgtgtactgtcagttgccatgatgccgttgtacctggtgactgtgaatgaaaggttattataaaaataatcacctccgttcaccagtccagatcccataaaaataattgctttctatttaactgaaatttaaagatttttaaattaattaatgattgttataaaaaatatcttgtatgtgatccagatcacatctatcatttagttatcgatcgttaagtaattgcttgcgacgtcattcatctgcataaggccactattatgaaaaacgtaaaaaccctcatcgctgcggcgattttaagctccatgagttttgccagctttgcggctgtcgaagttcagagtacgccagaaggccaacaaaaagtcggtacaatcagtgctaacgcggggacaaatctgggaagcctggaagagcagctggcgcaaaaagcggatgagatgggcgcaaaatctttccgtattacttctgtaaccggtccgaataccctccatggaacagcagtaatttataaataagcattaaccctcattaatgcctgctactgctgattttttccccgcgacatgccgtgtcgcggggatttttttatccgggctttacagcgtttgtgggctcacttgatgacggcggacatccaccggcatcccggaacggacatccatcacatgttgcatcacttcagcgtcagtttgtgctgcatctttaaaactttgcattgcgctattcagcgtaattggcagcagctgcggatcgtcatcaatcttctcactcagcggctgatgtacttcaaccagacgcgcaccgtttggttcggcagagacttttatcggagtgttgatgatattcactttggtgcctggggtgacctggctaaagagtgttttgatatcgtcatcccgcagacgaatacagccagaacttacccgcatgccaatgccgaaatcggcgttcgtaccatgaagcaaataaacgccgccataggccgccagacgaatcgcatgatggcccattgggttatccagtccagccggcactaccgcaggcaactcaattccctgtgctttataacgggcgcggatgtttgccgttggcgtccaggttgggtttgcacgtttgtcactaacggtggtcaccattgtcggtgtcagcgtgtcaccacctaactgaccaatacctattggatacacggttacgctatttttacccggcgggtagtaatagagacgcagctccgcaatgttgatcacaatgccttcgcgcggcgcatctggaagtagggtttgcaacgggatcgttaacacgctgcccgcgcgcggtacgtaaggatcaacgccggggttagcctgtaacagagcgagaaagccgacgttgtattttttggcgatggcttccagagaaccaccgtcattttccaccacatgaaatttgttttcgccaaccagacgactgcccgctggcggcagcggccaggtgttggcttttgccggtagcgccagcgccacggcagcggcgaacgtaaaaaacgttagccagcgagaaaaacgcgttttgatcatcaccaaaaatccataataaatataaggttattgtaataaacagataagcctgaattatggatggtgacagtgtcggatagtgcagggaagtgcaaagaatttgtaaatgttgcagatgggggcgcagaaacgcccccgatttaccattaagcgatcgcgttctcttccagttcacgcataaactggcgtacccattcgatacgcgttttccgctcactcaaatcctgaataaatttcaggcgcgtcggaccatcaaggcggtaatgctgcggctgtttttgcagcaaaccaatcaaccaggccggattaacgtgattcttctcggcaaattcgatcaccccgcctttctcattaccttccagcttcctgatccccagtttctgcgcttgctggcgcagacgggcaatatccagcagggtacgcgccggatctggcagcaggccgaagcgatcgataagctcgactttgatctcttccagttcgttttccgttttggcgctggcaatacgtttgtagaagctcagacgcgtgttcacgtcagggatgaaatcatctggcaataggctcggcatccgcagctcgacttctgtttgctggctggtgagatcttccaggctcggctcgcgtccggctttcagtgcatcgacggcgttttccagcaactccatatacaggctgaaaccgatggtttccatactgccgctttgttcttcgccaagcagttcacccgcgccgcgaatctccagatcgtgcgttgccagcgcaaaacctgccccgagatcttccaggctggcaattgcttcaagacgtttttgtgcatcggtagtcatcgcttttggatgcggtgtcagcaaccatgcatatgcctgatgatggctacgtccgacgcgaccgcgtaactggtgcagctgcgccagaccgaagtgatccgcgcgttcaatgataatagtgttggctgtcgggatgtcgatcccggtttcgataatggttgtacaaaccagcacgttgaaacgttgatgatggaaatcattcatcacccgttccagttcgcgctcgcgcatctgcccgtgaccgatggcgatccgcgcttctggcaccagttctgccagccgttcggcggctttctgaatgttttccacatcattgtagagataataaacctgtcctccgcgcaaaatttcacgcaggatcgcctcccggaccaccatgctgtcatactcacggacaaaggttttaactgccagacgacgggcgggcggcgtggcgataatgctcaggtcacgcattccgctcattgccatattcagcgtacgtgggatcggcgttgcagtaagcgtcagaatatccacgttcgcgcgcatcgctttaatgcgctctttatgacgcaccccgaagcggtgttcttcatcgacaatcagcaggcctaaatctttaaacttgacgtcactttgcagcagtttgtgcgtaccgatcagaatatcgattttcccttccgccacttccgcaaggatttgcgtctgctctttggcgctgcggaaacgggagatcatttcgatacgtaccggccagttggcgaaacggtcgcggaagttgtcgtaatgctgctgcgcgagaagggtggtaggcaccagcaccgccacctgcttgtggttatctactgccaggaaagctgcgcgcatcgccacttctgttttaccaaagccaacatcgccgcacaccagacgatccattgccagcggctgacacatgtcgctaagtaccgcattaatggcctgcgcctgatccggcgtggtttcaaacgggaagctgtcgcagaacaactgatactgctcacgatcgtgtttaaacgcgaagccctctttggcggcgcgttgcgcgtagatatccagcaattccgccgccacatcacgcactttttccgccgctttctgccgcgcgcgactccacgcatcgccgccaagtttatgcagcggggcgttttcttccgcgccacctgcgtaacggctaatcagatgcagactgctcaccggaacatacagtttggcgtcgttggcataggtgagcatcagatactcgccagtaatgccacccgcttccagcgtggtcattccggcataacgaccgacgccgtgctccagatggaccaccggctgaccaatatgcagttccgcaaggttacggatcagtgtatcggggttgatggtgcggcgagaatcctgacgacgacgggcaacgcgttcaccgagcagatcgctttcgcaaatcagcgccagattacgcaccgtatcgacaaaaccatgttcggcagcgccaatcatcagataacgcccacggtcgctggcttcatcaagacgcataatgcgttgcggagcaattttaattcgtgcgagcagttcacccagcgcttcacggcgaccttcactttctacgctgaacaccaccggaccgtcgaaagtctcgaggaacttacgcagcgcatccagcggcgctttttgttgtgcctgaacggccaggtctggcagtttctggaaacctaaattggcattcgcggcttttgtcggtaaatgttcagtttttagctgcacccggggccagtttttcagctcactgaagagctcgtccacccgcagccagaggctttgtggtggcaacagcgggcgcatcggatcgacgccgcgattctcaaaacgcgccagcgtgtcagcctggaaacgttcggcactggtttccagatcgccagtattcacgagcaaggtattggcagggaaataactgaacagcggcggcagtggttcgctgaagaacaatggctgccagtactcgatcccggcaggtaatgtgcctttactcacttgctggtaaatatgttctggatcgcgcttcacttcgaaggtatcgcgccactggctgcggaacagttcaattgccgctttatcggtcggaaattcgtgcgcgggcagcagattgatcgcttctacttcctccagcgtgcgctggctgtcgacgtcaaacacccgcaggctgtcgatttcatcatcaaagaaatcaagacgataaggcagctcactccccatcgggaagagatccagcaacgcgccgcgcgtggcgtattcgccgtgctccatcacctggtcaacatggcgataaccggcgctgtccagttgggttcgtaatgcatctcgactcaggcgctgaccttttttcatcaccagcgcatgaccgtggagaaaactgtgtgggcaaacgcgctgcataagcgtattcaccggaacaatcagtacgccacgctgcatcgtcggtagctggtaaagggtggaaaggcggctggagataatgtcctgatgagggctaaaactgtcgtagggaagagtttcccagtccgccagattcatcaccatttgatcggtaaactggctgatttcatcatgcaaacgcagagcattttgcatatctggtgcaatgagtaccaccggaccggcgtgacgttcggcaatttccgctaccagcgttgcacaggctgcgccggttaactcgcccagcagacgctgctcacccgctttgacgggcagcgtataacgatattgttcaggcataacggttgtcagattctcgttaggatatgcctcaacatatgggggcatatctctgataagcaatgctgttcattatccgtaatcgacatggtttagcaaattgaatcgccccggctggggcgatggcttagcgggagtaactgacggcagcgggcagactaggcggggagaacaacagatcgctgaatgcacgctgactaagttttcttaccagcaagcccgcaacagtacagatgaacaaactgacaaagggataaaccagcaggagtgtcagttcgacttgcgggctccagcgtgctgcgttcatttgcgcaagcagagttaagctgaatatttcaaccagaatgcgatgggtggtgtagatagcaatggtgttggagccaatcacattcagcaggctggtggagcgcataccgaatcgttgctcgtattgataaaacagcttcatgatcaccacaatgcttaccaggctcaacagcaggctgatagtaaacaaccaggcaccgaccgccagaacggtaagcaaagaagccatcagcagatggcggcgcaacggcacctctttaacacaggtcattattgttgcgccaaaccatgcgccaaggctgtaataaggcaaattgcggatcacactgttcattccccaccacggcgtgggaacgaaattaaccgccacactcagcagtacaaacaaggcgaatagtggcagcgccagacggctaaaaattttacataccacgaaatagacaattaacgcatacagataccacaagctggtgctggcggtgatcatcccgtgcaggaactcaccggtggaatcggcataagcggcattggaggcattgcttaaatcgcgctcaggtgccagccactggttcagcgcacttaacgccagccactgcaccacgccccaaagcgccagcacccagaagatgttccagatccgtttatcgagacaatttccccacggtacgctgtcgatatagcggcgaatcaaatagccggatataaagaaaaaaaccggcatacgaaagggggcaaggtaaagattgaaatagatccagcatttgctcaggacttcgcttaacggatgctgaaaagtggtcagatgcggataaaaggtaatgacgctgtgataaatcaccaccagacaaatacataaccctttgatctggttaatccatagctctttttgtttcatcaggacaacacgctcttttttaatttacatgcggttgatcctgcgggttatgacccgaggtgtaatgggtatctgtctgtattggatgatttttcagattaagatcaggcggcaagattgatgataaaacatggcaatttagccgattgatttacgggggcttttcagattagccctgacgatcacttacagttcagacgtttacccatcttgctttcgcttatatactcgtgtctttgctacagcaaccagacggatttcatgtaccaacctgtcgctctatttattggcctgcgttacatgcgtgggcgtgcagcggatcgcttcggtcgtttcgtctcctggctttctaccatcggcattaccctcggggtgatggcgctggtcacagtattgagtgtgatgaacggctttgagcgcgagctgcaaaacaacatccttggcctgatgccacaggcaattctctcttctgagcatggctctcttaacccgcagcaactcccagaaacggcagtcaaactggacggcgttaatcgcgtcgcacctattactaccggtgatgtggtactgcaaagcgcgcgcagcgtggcggtcggggtgatgctcggtatcgacccggcgcaaaaagatccacttacaccgtatctggtcaatgtgaaacaaactgacctcgagccggggaaatataatgtcatcctcggcgaacaacttgccagtcagctaggcgttaatcgcggtgatcaaatccgcgtgatggtaccatctgccagccagttcacgccgatggggcgtattccaagccagcgcctgttcaatgtgattggcactttcgccgccaacagtgaagtcgatggctatgaaatgctggtgaatattgaggatgccagccgtctgatgcgttatccggcaggcaatattaccggctggcgtttgtggctggatgagccgctgaaagtcgacagtttaagtcagcaaaaactgcctgaaggcagcaaatggcaggactggcgtgatcgtaaaggcgagttgttccaggccgtacgcatggaaaaaaatatgatgggtttactgctgagcctgattgtcgccgttgcggcgtttaacattattaccagtctagggctgatggtaatggagaagcagggcgaagtagcgatcctgcaaacgcaaggcttaactccgcgacaaatcatgatggtctttatggtgcaaggggccagcgccgggattatcggtgcgatcctcggagcggcgcttggcgccctgcttgccagccagttaaataatctgatgccgataatcggcgtcctgcttgatggcgcggcgctgccggtggctatcgaacctttacaggtcattgttattgcgctggtggcgatggctatcgcgctgctgtctacgctttaccctagttggcgcgctgccgccactcaacccgctgaggctttacgttatgaataagatcctgttgcaatgcgacaacctgtgcaaacgctatcaggaaggcagtgtgcaaaccgatgtgctgcacaatgtcagtttcagcgtcggcgaaggtgaaatgatggcgatcgtcggtagctctggttccggtaaaagtaccttgctgcacctgctgggcgggctggatacgccaacctccggcgatgtgatttttaatggtcagccaatgagcaaactgagcagcgcagcgaaagctgaactgcgcaaccagaagctgggctttatttatcagtttcaccacctgctgccggattttaccgccctggaaaacgtggctatgccgctgctgattggcaagaaaaagcccgctgaaatcaacagccgtgcacttgagatgttaaaagcggtggggctggatcatcgtgcgaatcaccgcccatctgaactttctggcggcgaacgccagcgtgtggcgattgcccgtgcgctggtgaataacccgcgcctggtactggcggatgaacctaccggtaacctcgatgcgcgtaacgccgacagcatcttccagttgcttggggaattgaatcgcttgcagggcaccgccttcctggtggttactcacgacctgcaactggcgaaacgtatgagccgccagttagaaatgcgtgatggtcgtctgacggcggaactgagcctgatgggggcggagtaatggcgatgcctttaagcttattaattggcctgcgttttagtcgcggacggcggcgcggcggcatggtgagcctgatctccgttatttctaccattggcattgccctcggcgtggcggtattgatcgtcggcttaagcgcgatgaacggctttgaacgcgaactgaacaaccgtattctggcggtggtgccgcatggtgaaatcgaggcggtggatcagccgtggactaactggcaggaagcactggatcacgtgcaaaaagtgccgggtattgccgctgccgcgccgtatatcaatttcaccgggctggtggaaagtggcgcgaatcttcgcgcaatccaggtgaagggcgttaacccgcaacaggaacagcgtctgagcgcattacccagctttgtccagggcgatgcgtggcgcaattttaaagcgggcgaacagcaaattatcatcggcaaaggcgtggcggatgcgctgaaagtgaagcagggggattgggtgagcattatgatccccaacagcaatcccgagcataaactgatgcagccaaaacgtgtgcgtttgcacgttgccggtattttgcagttgagtggtcaactcgatcacagttttgccatgatcccgctggcggatgcccaacaatatcttgatatgggttccagcgtgagtggtattgcccttaaaatgacggatgttttcaacgccaataagctggtacgcgatgcgggtgaagtgaccaacagctatgtttatattaaaagctggattggtacttacggctatatgtatcgcgatatccaaatgatccgcgccattatgtatctggcgatggtactggtgattggcgtggcctgtttcaacatcgtctccaccttagtgatggcggtgaaagacaagagtggcgatatcgcagtattaagaacgctgggggcgaaagatggtttaattcgcgccatctttgtctggtatggattgctggcagggctgttcggcagcctgtgtggtgtgattatcggcgtagtggttagtctgcaacttaccccgattattgagtggattgaaaagttgatcggtcatcagttcctctccagcgatatctattttattgatttcctgccaagcgaattgcactggctggacgtcttctacgtactggtcacagcattgttgctgagtcttttggcaagttggtatccggcgcggcgcgccagtaatattgaccctgcgcgagtccttagcggccagtaaaggcagtacattaaaacaaggagcggcaatgtattacgggtttgatattggtggaacaaaaattgcgcttggcgtgtttgatagcggtcggcagttgcagtgggaaaagcgggtgccgacaccgcgtgacagctatgacgcatttttagatgcagtgtgtgagctggtagctgaagctgaccaacgttttggctgtaaaggttctgtcggcatcggtattccgggaatgccggaaacagaagatggtacgctgtatgccgccaatgtccccgctgccagcggtaaaccgctgcgtgccgacctgagcgcacgtcttgatcgcgatgtacgccttgataacgatgccaactgttttgcccttagtgaagcctgggatgatgaatttactcaatatccactggtgatggggttgattctcggcaccggtgttggcggcgggctgattttcaacggcaaaccgattaccggtaaaagctacattaccggcgagtttggccatatgcgtctgccggttgatgcgttaaccatgatggggttggatttcccgttacgccgctgcggctgtggtcagcatggctgcattgaaaattatctgtctggtcgcggttttgcgtggctgtatcaacactattatcatcaaccgttgcaggctcccgaaattattgcgctttatgatcaaggcgatgagcaggcaagggcgcacgttgagcgttatctggatttattagcggtttgtctgggaaatatcctgaccatcgttgaccctgacctggtcgtcattggtggtggcttaagcaatttcccggcaatcacaacgcaactggcggacaggctgcctcgtcatctcttacctgtagctcgtgttccgcgcattgaacgcgcgcgccacggtgatgcgggaggaatgcgtggtgcggccttcctacatctaaccgattaaacaacagaggttgctatgctgagccgtcggggtcatcggttaagtcgttttcgtaaaaataaacgccgcctgcgcgagcgtttgcgtcagcgtatttttttcagagataaagtggtgccggaagcaatggaaaaaccaagagtactcgtactgacaggggcaggaatttctgcggaaagtggtattcgtacctttcgcgccgcagatggcctgtgggaagaacatcgggttgaagatgtggcaacgccggaaggtttcgatcgcgatcctgaactggtgcaagcgttttataacgcccgtcgtcgacagctgcagcagccagaaattcagcctaacgccgcgcatcttgcgctggctaaactgcaagacgccctcggcgatcgctttttgctggtgacgcagaatatcgacaacctgcatgaacgcgcaggtaataccaatgtgattcatatgcatggggaactgctgaaagtgcgttgtagtcaaagtggtcaggttctcgactggacaggagacgttaccccagaagataaatgccattgttgccagtttccggcacccttgcgcccgcacgtagtgtggtttggcgaaatgccactcggcatggatgaaatttatatggcgttgagcatggccgatattttcattgccattggcacatccgggcatgtttatccggcggctgggtttgttcacgaagcgaaactgcatggcgcgcacaccgtggaactgaatcttgaaccgagtcaggttggtaatgaatttgccgagaaatattacggcccggcaagccaggtggcgcctgagtttgttgaaaagttgctgaagggattaaaagcgggaagcattgcctgatgcactacgcttatcaggcctgcaaggggacgcaattaattgaatttgcgggttttgtgggccggataaggcgttcgcgccccatccggaataatacacgcgcacttttccggcctcttttatcgtttactcgtcaataacaatgcggcaataaacgtacagacaccaattagccctgcccagagtgggcttattctggtaatcgcaaagctattatcgatatacaaacataaagcctgataacccatattggcaatagtcatcgccactgcaaattttaacgcataaataaaacgagtcgtgtagtaaaagatcctggaaaataagataaacgtcgcagcccaggcgataaaacctaatgtgttggtgctgccggggggagcattttcatgctgttgtcctggatgcggataatacgttagtggcggcgtgctttgttttaatatctgtgcttgtagaacagccaatgcattattgattccctgataccagagatctgcatttaaataagccagcgtgtgattttctatcagaaggccgagatgtttatcgtccagaccactttcaacctggccgttggtgatcataattaaccgtggttcgcgggtagtaaatagtaacagaacacttccttttacatcactcaaactagaactcgcatgcgccagcatcgctttaccattttgtctgagactggcttcattattaatgtcgggtaaaaccacaataaacggtgcaattcccgtttgttggcgaaaaagctcggctttatgcgcgatctcttcagcatctggtacagtaccggtaacgtccgtaaaaagtgtcttcattattggaattaatggcttgctggctgctgtcagaggcaggagtatcagtaaactgagcagtataatgaattttttcatgggcgggacttccgtttcctgcgactttttttagaggagggcatacttattaataaaccgacggcgataaaaataacgcccataatgccgataaacccccatttaaaaaaattaacccacgggttatttatctcagccttttcaggatgcccgggagaataataaacattaactttatcgccttcgctgtcttcataaaaatcgctgccgatactgctattgaaaattagcgtgtaatctggcgtcggtcgaaaggcaacgacgggataccagctaccatctttacccgtgcgatgagaatgactggagtgccagacggtatcaacaatgacgccttcggtatgaatcgcgtctttgctataggtgaactggttataaaagacaacaacagaaatgaggatcagtaccagaccgataccgaggaatatacgaaagaaaactttactgtcctgactcattagccacatccttgctaactaaaaaacgggcggtaataccaccgcccgcttgctgaattaacgtcctgctttcagcttctgataatactcttcataaatgctgctggctgcgccaacgtcattctgccattcgccatttttaatggtttcagcatccgggtagagtgttttatcgttcgccacttctggacttaacagcttacgcgccgcaaggtttggcgttggataaccgatagtttcagcaacctgttttgccacatccgggcgcagcaggaagttgatcaatttcagcgcgccttctttgtttttggcatttgccgggatcgccaggctgtccatccagaaaatgccgccttctttcggccacaccacgtcaattggcgtacccgcctggcgtgcaacgaaagcagaaccgttccagatcatgccgaggttaacttcgccttccatgtacgggttcgccgggttatcggagttaaaggctgccacgtttggcatcagttttttcagctcgttatatgcagcttcaatctctttcggatcggtggtgttaccggagtagcccagcttacgcagcgccatctggaacacttcacgggcatcgtcggtcaacagcaggctgcctttgtactctggcttccacagatcggcccagctggtgacagatttcggatccaccgcatcaccgttaacaccaatcgccgtcgcaccccagatatacggaatggagtagtcgttattcgggtcaaaaggcttgttgagcatgtctggatcgagattgctgaagtttgttaacttgctcttgtcgatcttctggatcatcccttctttacgcattttatcaacgtaataggtactaggaaccaccagatcataggcaccgtctttgtatgttttcagcttggcgtacatggtttcgttgctctcgtaagtgctatagataaccttaataccggtttctttggtgaactgttcaagcagtcctggcggcacgtactcggtccagttgtagaaatacagcgtgttgttgtcatcggcgtgagcggcgctcatgcccagtgccagagcacccgccgcgagcaggtggcgactccattttttcatttaacgtcccctgtgttacctttcgttttatcacgagcaataagctggctggcaataaccatcaccaggctcagcaccagtaatatggttgccagcgcgttaacttccgggcttacgccgactttgaccatgctataaatttttaacggcagaatttcataacttggtccggtgacgaagctagaaactaccacatcgtccatgctcagggtaaagcttaacacccagcccgccgccaccgctggcattgccagtggcagaatgatttttcgcagaatggtaaattcgctggcaccgagatctttcgccgcttccagcattcgcacgtcaaaacctttcaggcggctatacaccgtcaccaccacaaatggcaggcagaaggtgatatggctgaacagcaggctccagaagccaagctgaatacccagcagcataaacagcaccagcaggctaatcgccatcacgatatctggactcatcatcaccacaaacagcattccgctaacgaacggcttaccacgaaagcgataacggtacagcgcaactgccgtcagactaccgataagcgtagcaaacgtcgcgctaaacaccgccattgttagactatgctgcgctgcctgtaacaggctgtcgttgttcatcagcaggctataccatttggtggtaaagccctgccagttgatgccaaagcggctgctgttaaaggagttcacaatcaaaataatgattgggatatacaggtacgcgtagatagcggtcataaaaccgccgcgaagcagtcgaccgatcattcgagttccaccttcttattcagcaaacgagaagcgcgccagtaaaccagcaacatcaggcccattacgatagtcagcgtaatgctggtagctgcaccaaacggccagtcacgaatattaaggaactggaccttgatgacgttaccgatcagcaggtttttcgcaccgcccatcaggtcggatacatagaacaggcccatcgctggcagcatcaccagcagacatccggcaataattcccggcatcgtcagtggaataatgatacggataaaagtctgtaacttgctggcaccgagatcgcgcgccgcctcaagcaacggcttatccagtttttcgatactggagtacagcggcatcaccataaacggcagcagaatgtaaaccagaccgataatcaccgcactgggcgtgaacatgatacggattggtgtgtcgataacgcccagccagagcaaaaactcgttgagatagcctttggtgctgaggaaaattttcagcccgtagatacgaattaaactgttggtccagaacggaacaatcagcagaaacagcagcagcggacgcaccttgtgtggcaacttcgccagaaaccaggcaaacgggtagcccagcaccaggcaggcgagggtggcgatcagcgccatattcaggctgtgcaatagcacttcaaaatagagcggatcgagcagacgcgtgtagttatccagcgtaaagaccattttgacaaaactggcgtcgtcgcgggtcaaaaagctggtgccaatgatcatcaggttgggcagaaagacaaacaacacaagccaaccgacaatagtgacaatcactacattctggaacttacttgtgttcttcatcagccagtacgacctcccagctttctacccaattaatggccattttttggtcgagagagtggtcaaagtcaggatcgtcttcattgaagaattcgctgaccatcaccatcttgccattttccagttcaacaacgctctccagcgtcatgcctttgtagttacgctcgcgaacgtaaccaatcagcccttcagcgtggttgtcgtcgttaatctcttcaacacgtaagtcttccgggcgcagcagaacatgcagtttttgccccggttcaacggcgaagttaacgtagatattacattcgcggccttcaacgttggcgcgtacgcgctgctcgtctagacgttcgatgacagtggcgttaaacatattgatttcgccaatgaagccggcaacaaacaggtttttcggctcttcgtagatttcacgcggcgtgccgtcttgctcaatgcgaccatcgcgcatcaccacaatcctgtcactcatggtgagtgcttcttcctggtcgtgagtcacaaagacgaatgtaatgccaagcttacgctgtaacgctttcagctcgttctgcatttgcttacgcagtttgtaatccagcgcactgaggctctcatccagcaacaacagacgaggcttgttaaccaccgcgcgagcaatggcgacgcgttgctgttgaccaccagagagctgatgcggtttgcgttgagcgaaggtttccaactgcaccatccgcagggcttccatcacgcggggcgtaatttcagcagcgggggttttttgcatgcgcaacccaaaggccacattttcgaacacggtcatgtgggggaaaagtgcgtagctttggaaaacagtgttcacatagcggttttccgccggaacgtgggtgatgtcctcgttatccagcatgatgcgtccggaatcaacagtttccagacctgcaatcaggcgaagaacggttgttttaccgcagccagaagggccaagcagcgtgaggaactcgccattgttgatagtcagatccagctggggaatgacctctttaccatcaaagcatttgcgaattcccgccaattgcaccagcggactaaggctactcggttgtttattcaattttttactctgtcccatgtaaacgcaacggatggcttaccgatgcggggtttgtggttaaccaccttggtgactcttaatgagggcggtaattctacggcaaaccgcttgaatcgccaatctttgttgtgaattactggcttagctttatattcattaaggtaatgctgataaatattcccgcttgcaggggtaaaagtgacctgacgcaatatttgtcttttcttgcttcttaataatgttgtcacaaaaagtgagggtgactacatggataaactacttgagcgatttttgaactacgtgtctctggatacccaaagtaaagcaggggtgagacaggttcccagcacggaaggccaatggaagttattgcatctgctgaaagagcagctcgaagagatggggcttatcaatgtgaccttaagtgagaagggcactttgatggcgacgttaccggctaacgtccctggcgatatcccggcgattggctttatttctcatgtggataccagtccggattgcagcggcaaaaatgtgaatccgcaaattgttgaaaactatcgcggtggcgatattgcgctgggtatcggcgatgaagttttaagtccggttatgttcccggtgctgcatcagctactgggtcagacgctgattaccaccgatggtaaaaccttgttaggtgccgatgacaaagcaggtattgcagaaatcatgaccgcgctggcggtattgcaacagaaaaaaattccgcatggtgatattcgcgtcgcctttaccccggatgaagaagtgggcaaaggggcgaaacattttgatgttgacgccttcgatgcccgctgggcttacactgttgatggtggtggcgtaggcgaactggagtttgaaaacttcaacgccgcgagcgtcaatatcaaaattgtcggtaacaatgttcatccgggcacggcgaaaggagtgatggtaaatgcgctgagcctggcggcacgtattcatgcggaagttccggcggatgaaagcccggaaatgacagaaggctatgaaggtttctatcatctggcgagcatgaaaggcaccgttgaacgggccgatatgcactacatcatccgtgatttcgaccgtaaacagtttgaagcgcgtaaacgtaaaatgatggagatcgccaaaaaagtgggcaaagggttacatcctgattgctacattgaactggtgattgaagacagttactacaatatgcgcgagaaagtggttgagcatccgcatattctcgatatcgcccagcaggcgatgcgcgattgcgatattgaaccggaactgaaaccgatccgcggtggtaccgacggcgcgcagttgagctttatgggattaccgtgcccgaacctgttcactggcggttacaactatcatggtaagcatgagtttgtgactctggaaggtatggaaaaagcggtgcaggtgatcgtccgtattgccgagttaacggcgcaacggaagtaagcgaaaagggatgcggcatgtgatgccgcatccggcttaaatccaaacttacccttcgaagaaccaatacccgctattgaccagcgccgcgagcatcgcgaggaaactcggatcttccagcgcatcgccaaaattctccgcagtcagcgcaatgttgctggcgagtgcatccagtgccggacggtgcggggaatcgatcttctcaccattggcatacacgtcgtcgccaatgcgcaatacgcgcagaccacccaggcgcaccagcacttcaccttgtttcagcgcatcgtagatttcatccggctgataaggcggctctggcggcgcgatatccagttcatgacgactctgggatataaactcgccaaaccattgcttaaagtgttccggctggttgatcaattcgagcatcatctcacgcagtttatccatctcttgcggcagaacatccgcaggatgagcgcgaggtggaacatccggatcgctgtagtagttgccgcccagttcacgttgcagcacataatcggcaaatccactaatcagttcccgcgtatttggcgcgcgaaagcccacggaatagttcatcgcattttccagcgcgtagccttcatgcgggaatcctggcggaatataaagaatatcaccaggctccagctcttcatcgatgatggcttcgaacggatcgacctgtaacagatccggatgtgggcagtgctgtttcatttgcagcttttcgcccactcgccagcgacgacgtccggtaccctgaatgataaacacgtcgtactgatcgagatgcgggccgacgccgccgccgggtacagaaaaagaaatcatcagatcatcaatacgccagtccggtagttcacggaacggtcgcatcagcgcggcggtcggctcatgccagtggttcactgcctgtaccagtaaactccagttggtttcaccgagatgatcgtagctttcgaacgggccgtggctgacctgccatttgccatcctggtgactgaccagtcgactgtcaacttcgctttccatcgccagacccgccaactcgtctggagagatcgggtcaataaaattattaaagccgcgttttaacaccaccgggcgtttctgccagtgacgttcaagaaaatcgggccagttaagagtgagttggtattccatgttaagcatccacaggctggtatctgcaaccgattataacggatgcttaacgtaatgcgtgaagtatgggcatatttattcatctttcggcgcagaatgctggcgaccaaaaatcacctccatccgcgcaccgcccagcatgctctctccggcgacgattttaccctcatattgctcggtgatttcgcgggctaccgccagccctacaccttgcccagggcgtaaagtatcaacccgttgaccacggtcgaaaatgacctctcgcttgcttaatggaataccggggccatcatcctcgaccacaatatagagatgctcgtcggtttgccttgcagaaatttcgacaaactcgaggcaatatttacaggcattatccagcacgttgcccatcacctcgacaaaatcgttctgctcaccgacaaagctgatctctgggctaatatcgagagagatattgacccctttgcgttgatacactttgttcagcgcactggtgagattgtccagcagtggggcgaccggatgcagctcgcggctgagcaatgtcccgccgcgcatactggcacgatgcaggtagtagccaatttgctgactaatgcggctgatttgctccagcattaccggctcagcatcactgacgctcatcttttcactacgcagagaacgcagcgtactttgcagcaccgccagtggcgttttcagactatgggtcaggtcggtgagcgtcgtacggtatttgtcgtaacgttcgcgttcactttttaacaatcggttcaggtttcgtaccagactggtcagttctcgcgttgtggctggattgagcaattcgcggttatgttcttccagttcgcggacttcttttgccagggcttcgatggggcgtaaactccaccaggcggcgacccacagcagcgggatcactaacagcagattggcactgagcacatagataaaccagctccagaccatataggaactttttagctccaccggaatggtatccaccaccacaatggttaattttggcatccggcttgttgccgggtagacgtttactgccacgctgtgggtcatctccgcgtcgtcatcatcttcccgcacttcctgcaactgttgctgtatgctatgatctccactcagcaagaggctggtatcgttaacatccgcttcaatttcatgaaaaccattgcttttcagccagtcaggctggatcatcttcatcagccagggcacgtcacgttgcgcccataaaagctgcccgttctcatcataaattagcgtcatggtggggctttgcttgtcgatattttcgggtaactcgacatgcaacttattgttttcccacttcgcaagggtatagaacagattgctctcgccacgtaacagccgaaacgtagttttatcgaaactgacgctataaccgatcagcgcgaccattccgtaggcaaggctaagcaccagtactaccgctgccgttgccaacagaaaacgtacccgcaggctgagcgggaaaaaaagacgcagtaattttttcatcagcgcaattcgaacagatagccctggccgcgaacggtggtaatcacttcttggggatattgtgcctgaatttttttgcgcagacgtcccatcagtacatcaatggtatggctttcccgcagctccgcatccggatagagttggagcattaagctatctttgctgaccactttgccattattgcgtatcaacgtttccataatagtgtattcgaacgcggtcagtttgatcacttcgtcattaatagataattcacggcgagagagatcaacctgaaacggggggaggctaatgacctgactagccagaccgctattacgccgcattaatgcctgcattcgcgccatcacctcttcaatatgaaacggtttagtcacataatcatcagcaccggcacttaatacttcgactttgtcctgccagctttcacgggcggttaataccagaatcggcagactaacatcgttgctacgccagcggcgaatcagactcagaccgtcctcgtctggcaatccgagatcgacaatcgcaatatccggtatatgttcattgagataataatcggcttctttggcatcttctgcgtcatcgacctgatgaccagcatcctgaatctgaactttaaggtggtgacgtaacaacgcattgtcttcaacaaccagtacgcgcatttttatttctccctgtcttaattattaaaatagtgtaacgcgattatgtggttatgggggtaaacattaaataaaccagcggggaggggaggtaaagtgaaaaaataaaaagcggataatcttaataagcaggccggacagcatcgccatccggcactgatacgaggtttatttcagctcatcaaccatcgtgatagctcgaccaatatagttagccggcgtcatcgctttcaggcgggctttctcttcttctggcaacgccagaccatcgataaactgcttcatgccttcggcgtcaacgcgcttaccgcgagtcagctctttcagcttctcgtacggtttttcgatgccatagcgacgcataactgtctggattggttcagccagcacttcccagttgtgatccagttcatccagcagatggtcacggttcacttccagtttgctcacgcctttcagggtggattgatatgcaatcaaggcataaccgatacccacgccgaggttacgcagcacggtagagtcggtcaggtcacgctgccagcgggaaaccggcagtttgcttgccagatgctgcaataccgcgttggaaaggcccagattcccttcggagttttcgaagtcgatcgggttaactttatgcggcatggtggaagaaccaatctcaccagcaatggttttctgtttgaagtggttaagggcgatataaccccagacgtcacggtcaaagtcgatcagaatagtgttgaagcgcgcaacgcaatcaaacagttcggcaatgtagtcgtgcggttcgatctgggtggtgtacgggttccactgaatacccaggctggtgacgaactcttcgctgaactgatgccagtcaacttccgggtaagcggcgatgtgggcgttatagttaccgaccgcgccgttgattttgccgaggatctccacctggttaagctggcggtactggcgctccatacggtaggcgacgtttgccatctctttaccgatggtactcggcgtggctggctgaccgtgggtacgagacagcagcgggatatcgcgatactgaacggcgagatctttaatgccatcaatcagttgacgccagtatggcaggatcacttcatcacgcgcggttttcagcattaatgcgtgggagaggttattgatatcttcgctagtacaggcaaagtggatgaattcagaaaccgcgtgcagttccgggatctccgccactttttctttcaggaaatactcaaccgctttaacgtcgtggttagtggtacgctcgatagttttgatgcgcgccgcatcttcttcgctgaaactggcgacgattgcatcaaggtaaccgattgcgtcggcagcaaaagcaggaacttccttgatcgctgcgtgcgcggccagtttttgcagccaacgtacttcaacttgtacacggaatttcagcaaaccatattcgctgaaaatcccgcgcagcgcgctgactttatcgccgtagcgtccatcgacaggggaaacggcggtcagactggataattccatagatcacaactccggggttaaatgagcaagaatttgttttgcctgagtggtcaggcgattacgagaaaacatcagttgcagacgtccgccgccgacctggtgccagagcacggcggcgcgaatgcctgccagcagggttgcgcgaactttcgcctgcacttgtgggctttgcagtacagcaggggaaccggtgacctgaatgcgcgggccaagcgggctaatcacatcaacatagatagcagccatcgcgctcatcagcgtttcggactgtaaatcgaagtgttcgagctggcgttgcaggccgttgatccggttgcccagagtgtcgagcgcgcctttcgcactggagagtttgcgctcaagcaccatcaagctgagtgtgtagcgggttaattcggcgtttaagccctggcgactgctggcattgagcacgccgagcagggtttccagcccgacgcgcaggttggcttcgctaccgccaaaaaccgccagcgtgctgctggggttcatatcaataatactgttgagactgacgtgtagcgcatcggcatcacaatgcccctggtgagcgagttgttgcaccaggcgtgcgctctgacaaataccggccagggcgagggtgatgtcatagtaattctttgccacgttcactgcttccttgttttaagtaaagataataatcagaccggcagcggcagacgctgctcaataataccgccaccgaggcacacttcaccgttatagaagacggcagactggcccggcgtcacggcggcaaccggttcatcgaaaatcacttcaatgcgatcatcgtccagcgccttgacggtgcaagggatatcggtctggcgatagcgggtttttaccgtgcaacgcatagtgccggtgaatggttcgcgatcgacccagtgcaactgctgggcaatcaacccgacagacatcagccgcgggtgttcatggccctgagcgacaaccagaatgttgttttcgacgtctttgtccaccacataccacggttcttcggtaccttctttggtgccaccgatacccagacctttacgctgaccgagagtgtgatacatcagcccctggtgctcaccaatttcatcgccatcgacggtaatgattttgcccggttgcgccgggagataacggcccaggaactcgcggaatttacgttcgccaatgaagcaaatgccggtagagtcttttttcttcgcggtgaccagaccaagatcttcagcaatcttacgcacctgcggtttttccagttcgccgaccgggaacaggctttgcgcaatctgctcatggctgagcgtataaaggaagtagctctggtctttattgctgtccagaccacgcagcaggcggctcttgccatcgacatcggcccgacgtacgtaatgaccggtagcgatataatcggcacctaaatcttcggcggcaaattcgaggaaggctttaaatttgatctctttgttgcacagaatatccggattcggcgtgcgaccggctttatattcggcaaggaacagttcgaagacgttgtcccagtactcggcagcaaagttaacggtgtgcagttcaatgccgagcttgtcgcagacagcctgggcatcagccagatccgctgccgctgtgcaatattcctcaccgtcgtcttcttcccagttcttcataaacaggccttcgacctgatatccctgttgttgcaacagccaggcagaaacggaggaatcgacaccgccggacatgccgacgattactttttttgcggtttcagacattggatcactcacgacattgaacttcaaggcggcgtattctatcacgcagccttttagatgacaccctttgtaaaaggccagttaaaatcgccaatcatctccagcggataacgttgcccgctttgataacaacgaatactttccgccaccagcgggctacgaagattactcgcctgtaaaatttcttcggcgctgacccaacggcagcagtcgatatcgctgtcatgaggctgggtcgggcatatttgctcaagctcaatggcaaagaggaaacgcaaaaacggcgttttatctggcgcaatccactgatgcatacgaataaagtgttgcggctgcgcgctgatgccggtttcttcccacagttcacgggcggcggcttccactaaggtttcatcggcttccagatgcccggcaggttggttccataacgctttaccattaatcgtctcttcaacgactaaaaatttgccttctgcgtgcaccacgcaagcaacggtaacgtgcggtttaaacattttgcatccttaatctgtcacttctcgccattcaccattggcaagattatccaaagagtaatcacccatcgcatagcgaatcagtcgcagcgtggggaagccaacatgggcggtcatgcggcgcacctggcgattacgtccttcatataaggtgatcttcagccagctggtgggaatacttttgcgttcacgaattggtggattccgcggccataaccacgcgggttcgtcaaccagctccgcgccggcgggcagggtagggccatcatttaaggttacgccattgcgcaaggcttcaagtgcgtcttgtgtgggaataccttccacctgcacataatagatttttccggtgcgtttacccggctgggttaaacgcgcctgcaacgcgccgttattggtcagcaccagcaacccttcgctatcgcggtcaaggcgacctgctgcataaacaccctgaaccgggatgaattcttttaatgttttgcgtccggcttcatcggtgaactgcggaagaacatcgtagggtttattgaacaggatcacacgcgtgggctggttttcaggtttacgcctggtagaacgttggctgctgaatcgcttaacctggtgatttctaaaagaagttttttgcatggtattttcagagattatgaattgccgcattatagcctaataacgcgcatctttcatgacggcaaacaatagggtagtattgacaagccaattacaaatcattaacaaaaaattgctctaaagcatccgtatcgcaggacgcaaacgcatatgcaacgtggtggcagacgagcaaaccagtagcgctcgaaggagaggtgaatggaaagtaaagtagttgttccggcacaaggcaagaagatcaccctgcaaaacggcaaactcaacgttcctgaaaatccgattatcccttacattgaaggtgatggaatcggtgtagatgtaaccccagccatgctgaaagtggtcgacgctgcagtcgagaaagcctataaaggcgagcgtaaaatctcctggatggaaatttacaccggtgaaaaatccacacaggtttatggtcaggacgtctggctgcctgctgaaactcttgatctgattcgtgaatatcgcgttgccattaaaggtccgctgaccactccggttggtggcggtattcgctctctgaacgttgccctgcgccaggaactggatctctacatctgcctgcgtccggtacgttactatcagggcactccaagcccggttaaacaccctgaactgaccgatatggttatcttccgtgaaaacagcgaagacatttatgcgggtatcgaatggaaagcagactctgccgacgccgagaaagtgattaaattcctgcgtgaagagatgggggtgaagaaaattcgcttcccggaacattgtggtatcggtattaagccgtgtagcgaagaaggcaccaaacgtctggttcgtgcagcgatcgaatacgcaattgctaacgatcgtgactctgtgactctggtgcacaaaggcaacatcatgaagttcaccgaaggagcgtttaaagactggggctaccagctggcgcgtgaagagtttggcggtgaactgatcgacggtggcccgtggctgaaagttaaaaacccgaacactggcaaagagatcgtcattaaagacgtgattgctgatgcattcctgcaacagatcctgctgcgtccggctgaatatgatgttatcgcctgtatgaacctgaacggtgactacatttctgacgccctggcagcgcaggttggcggtatcggtatcgcccctggtgcaaacatcggtgacgaatgcgccctgtttgaagccacccacggtactgcgccgaaatatgccggtcaggacaaagtaaatcctggctctattattctctccgctgagatgatgctgcgccacatgggttggaccgaagcggctgacttaattgttaaaggtatggaaggcgcaatcaacgcgaaaaccgtaacctatgacttcgagcgtctgatggatggcgctaaactgctgaaatgtagtgagtttggtgacgcgatcatcgaaaacatgtaatgccgtagtttgttaaatttattaacgggagcgtaacgctcccgttgttttttgttaggctgctaacggttatcaaaattttatcaaaaaaagttatcaaaacccctcggtagttttggggtaggctggccggtcaggtggtagttctactactagtctcccacatagatattccttagctttttattattgctggcggacgctcgttaatatttaaggtcttcattgattaagacatccccaaagttagttatgtattcactgttattaggacaattatgaattaccactccttacacccgctcaaatattgttaaattgccggttttgtatcaactactcacccgggactcgccaggggacagccaacaggcattgggtgcaatcaccttagcgttcaggtacatgcggaatgtaaaaaaggccgcgagcgcggccccttcacatacatctttagtactgagactgtttaacctagggaattattatcgtattatattgcattacaactcccaacagtgacatatgaacttcctgctttactccacgactttaatatttcaaggccatgtgaagaacatatttcttgcactgcgagttcatcgagtaatccatagtaagaaacactttttgaatttttgtaaatgtatccgtaaagatgttttcttcctgtttcgtattttttgaagtatgagcttttatattgatttacaataagagtctcacctcctgattttagtaatctcttgatgctaagaactatcagataattcaaagcgtggctgtgatgataggaattatgttttttacgtgaatgagaataatcttaaatgaggaataactcattgattgacaatatttttattcaagaagtgtcattgactgttaacgcaatgttgtaaaggtaagataatctgatttatcaatattattgtgtgatttttatgtgagcagaagatattcatcagcaacgattacattagtcattttattttgccgacggcctcattgtcgaaagataagcgtacgacagtattatcagaaaagagtgattttttatccaactacacttcagcgcactgcgtgtaaaaaatgcctctttcttatgcgggatatcatcatttcatcatgatgtctttggtgagcggtgaacacaatgcacctgcgctgtctcttcaggatgaatcccctggtctggtgcctgcgggctgatgttgcagcagagcttaggagtcttagacgctactatcatttatccaatggcatggaaagcaaaagtgtcgatacccgcagtatatatcgtgaactgggtgcaacgctgagttacaacatgcgcctggggaacggtatggaaatgaaccctggctgaaggcggctgtgcgcaaagaatttgtcgatgataaccgggtgaaggtgaataatgacggtaatttcgtcaatgatttgagcggcagacgtggaatataccaggcagctattaaagccagtttcagcagtacgtttagcggacatctcggggtggggtatagccatggtgccggtgtggaatccccgtggaacgcggtggctggtgtgaactggagcttctgaccatcaacgattaaactgcgcttcggcgcagttttcgtttacaggatgttgaaagggaaaattctggggcaaaaaaagcccgccagttacggcgggaaacctcatcctatgggagaacaatgaataatgaaattgcggggttatcatctcccagtatatccatactaacaataaggttatttactcaaccaggcataaacattttgttttgtgcgtgggaacagccttaaggtgtaaagggggaggtggaaatagcaatgaggagtatcagcaagaatactcgccgctttaccacaacgtggatgagagggatgaaaaactcaaggcagagataactctgccttgaagataaatgcgcttttacagcgggcttatttcagctcttctgcttccggtaaggtcacgttcagctcaagaatagaaatatcgccatctttttgctcaagctgtacggttaccatctcaggatcaatttgtacgtatttacaaatgacctcaagaatatctttacgcaactgcggcagataatgcggttctgcatcgctgcgacggcgttcagcaacaataatctgcagccgttcttttgcaatgttggctgtgtttttcttccggctgagaaagaaatcgagtaatgccataacttatcctccgaacaagcgtttgaggaagcctttcttctcttcttcaatgaagcggaaaggacgttcttctcccaacagacgttctacggtatctgcgtaggctttacccgcatcggcgttaatgtcgagaatgaccggttcaccctggttagaggcgcgcaatacactttgatcctctgggatcacgccgacgagtttgatgcgcaggatctccagcacatcttccatgctcagcatgtcacctctgcttacgcggcctgggttatagcgcgttaacagcaggtgctctttaataggctcttcgccattttctgcgcggcgacttttgctcgccagaatgcctaaaatacggtcagagtcgcgtacactggagacttccgggttggtggtaataatggcttcgtctgcaaaatagagtgccattaacgcaccggtttcaatccctgccggggagtcacaaacgataaattcaaaatccatcgctttcagatcatcaagaactttggcgaccccttcacgggtgagggcatctttatcgcgtgtttggcttgccggcagaatatagagattttcagtacgcttatctttaattaacgcctgatttagcgttgcatcgccctgaatgacgttgacgaaatcgtaaacgacccggcgttcacaacccataatcaggtcgagattacgcaggccgatatcaaaatctatcacgacagttttctttcccttctgggccaaaccagtggcgatggccgcgctggaggttgtcttaccaacaccccctttgccgctagtaacaacaataatgcgtgccatagaaattccttgttaaaaagggatcaatttaacggttgaacggtcaaagcgttttcgactaactgcagtcgcgccgctttgccataaaattctgctgggatttgatcactcagccagtattcacctgcgatggacaccagttccgccatcaggttcgtacaaaatatttgcgtttcccggtcaccacttgcccctgccagcgcacgaccgcgcatcatgccatagacatgaatgttcccatcggcaatcaattcggccccagcgctaacgtggcttgtaacaatcagatcacattgtggagcataaatacgctgaccggaacgcaccggggtatctattaaacgcgtttttgtgaccggcgttgtattttgcgctggagcctgcggtgtgggagctggacgtggcgctttttcctttccttccgtcaggataggcagccccatcttttcaatttcggctttaagttgcgcatctttgcagccacttacgccaataacccgcaaaccggttgcgctaaccgccttatgcatcgcactccagtttaccgggtcttccagtgcactgacgttgagtacaacgggggcatgttttaaaaatgcgggggcctgagcgattttgtcttccagcgcctgatggataaccttaggttctgcctcatgcagatgaaccacagataaagtgaagctactgcctttaagctcgattggcgtgttactcatcctggccttactcaattagctattaatcatcgccagcgcgcgatgatgttccgaagactataaggcatgttatagtctggattatattgaggcaagtcaccctcccatttattcagagtaaaagtctattctgtgataaatggcgctgattcatagcttaaaaaatacccttgtcaatcaacccattgccgtcgtacttttgattgttcttatttacgcttcctttttccgcaccctaatcgtgacagcatctccagacctgtttaaatatccagtattgaggcaagtgtattttttcaccacgccaggctttcttaactttccattttttgcggcatcattaaagaacagatacccgttatcttaatatccgccacagaattgctctatcatagaaaccgcagaagacgtctgatacttctgtcaggtcatcgtaactcgtccaggtcagcggttttgattacggattgatgatgaaatgagcataagtgttgtacggttggattatcaggatgtgctatgaatatgatgcgtattttttatatcggattgagtggtgtggggatgatgttcagtagtatggcgtctggaaatgacgctggcggacttcaatctccggcgtgcggcgttgtttgcgacccgtatatttgtgtgaacagtgatggcatttccccagagttaacaaggaaatatctcggcgaaaaagccgctgaaaacttacaaagtttacaaggctacgatcccagcgaatttacattcgctaacggtgtattttgcgatgttaaagaaaaattatgtcgtgatgatcgttattttggtgtggatggtaagcggagtggaaaaatcaatcaaaccaccacaaagatgttatttatgtgtcgtgagtgatgtcttgtttacattatgttctattcgtcattaacctcttgagcgacagagaggagtggggcattaacgtttatgacggggagagtccccgtcggttgacatttacttaatttgaatatcgacgttatattttttagttttgtttttacgggcgtcgtttcgggtttgcaacactcgcagctcatatttgccagaagcagggagactgtattgtccgtgactatcgagttctggggaatatctggataaatcaacactatcatcgattcctggcccgaagaggtaagtatcagcgccttcattagagatactcacatgcactttctgaccttttttggcatagaaggtatatgtatcgtaatcgtatccctttatttcgccggagtactgagcgctgctatggccttttctgaactcaacattgacattcttacccgcagcaaagctcgtggaggttagcagtgcaagcagcaatacagccttcctgatgctcttgattttcattggtagtctcctgttcagaatgagtacgatgaactgttataatataacaatccctaacgggagaattccagtggctttcctgcgttcggtaaaatcacgttgcggcatttttgccggggggattacttataaagggggcatggactcaacaaaccgtagaaatctacagctggctggcttgtggcgcgggtttcattgatgttagcttatgccaaaacctggcatcttaaagagtaaaagtatgttttgtgtgatttatcgaagcagcaagcgtgaccagacctatttatatgtcgaaaaaaaagacgattttagccgtgttcctgaggaactgatgaaaggttttggtcagcctcagttagcgatgattctgccgctggatgggcggaagaaactggtcaatgccgatattgaaaaggttaaacaggcattaaccgagcaaggttactatttgcagttaccgccaccacccgaagatttgctgaagcaacatctttccgtcatggggcagaaaacagacgacactaacaaataaccgatatccggcggtggcattatctttgtcggcgcgggttttcatatccacgataaggtgaggggaacgttatgtatcaacatcacaactggcaaggtgcgctgctggattatccggtgagtaaagtagtctgtgttggcagtaactatgccaaacatattaaagagatgggcagcgcagtgcccgaagagccagtgctgtttattaaaccagaaacggcactgtgcgatctgcggcagccattggcgatcccatccgatttcggtagtgttcatcatgaagtcgaactggcggtgttgattggcgcgacactgcgtcaggctacggaagagcatgtccgcaaagccattgccggttatggcgtggcgctcgatctgacattgcgtgatgttcagggaaaaatgaagaaagccgggcagccgtgggaaaaggctaaagcgtttgataactcttgtccgctttccgggtttattcccgcggcggaatttaccggcgacccgcaaaatacaacgctgagcctgagcgtaaacggcgaacaacgccagcaaggtacgactgcggacatgatccataaaatcgttccgctgatcgcttatatgagcaagttttttaccctcaaggccggtgacgttgtgttgacaggcacgcctgatggcgtcggcccgttgcaaagcggtgatgagctgacagtcactttcgatgggcattctttgacaactcgcgttttgtaatactttttgccgcctgaaagcggcggcaaaacttgcatcgctgtgccagactggttataaggtgcgttttaacgtaatggcggaacacctgatgagcgatgtacctttctggcaaagtaaaaccctggacgaaatgagcgatgcggaatgggagagcttgtgtgatggttgcggtcagtgttgcctgcataaactgatggatgaagacaccgacgaaatctacttcactaacgtcgcctgtcgccagctcaatattaaaacctgtcaatgtcggaactacgaacgtcgtttcgagtttgaacccgactgcattaaattaacccgtgaaaatctgccaacattcgaatggctgccaatgacctgcgcttatcgtttgctggcggaaggtaaagatttacctgcgtggcatccgctacttactggtagcaaagcggcaatgcatggtgaacgtatctctgtgcgtcatatcgcagtgaaagaaagtgaagtgattgactggcaggatcatatcttaaataaacctgactgggcgcagtgataaatttaatagatgctgatgggggctttcttaatatacgtctggatgctcgccatttcgtagccctgtttttgaaagcgctctgtcataatgagagttacccgataccttattatcaacaggtaactctcaatctttaaaaaacgtctgtgtttttaaatgtgataaaccttataccttgagtacatggagagaataatcgcttatcagacttcaggtacctcaaagagtgtctttttaccgtgtcttttctgatactcattacaggtgttaatcatttttttggccgcttcttttagcaaagaaagcattaaatcatcataatcaacgtagaatctggttgtttcagtttccgtttttatctcaccgatggcggctatttcggtggttaatttcaatttggcggcatcgatatctttattcgcttgtttaaccgtgttagacagggtggtaaagaaattctgcacagattttaacttgttcttcaattctggaatcagttttccttcaactacgcccgcagcaatagaataggaaatgattaatccaaatggaccggcgacgacaccggctgcggcaccggcatatgcttccttcctgattttatctacctgactctggaaatagctgcttttttcactaaaatcattggttaactggctatctaacgccagcagtttcccggaagcgttgttgaaactttgactgcttaccagcagggatttttgcgcttcattcagcttcgtgatgccgtcatccagtaccttaatgagaatgtctttctgggcggatgctttcttctcattgtactcatcaaatagcaaaatatacgctgcgagcaattgcgtcgcaacaccacaccattcatacactgtttgggttgcttcaaaatacttatcctggctatccataagtaaggttttaatatcgccgactaaaacggaggctgcctgactatactcctgtttaaagcgacttaactcttttatggtttcatcaaaggtctgccaggggatgacctgatcgagatatttattataaagatctaatgctccatctgcggtttcgattgcgtttttaactacttctaccgttttatctgcaacgatttcagtcataatcattcgcctctttaaatatataaattgtaatgaaactcctgttttacaactattaataaattttacttcatctaattcatagttagccgggcgggatgcgtcaatgtctttatttctattaatatgataaatatcaaacaatgtttaatgtcattatggcgaatgcttctattctattttttagccgggtgatatttttcatttctgctggatgagcgtcgtcgccagaaggccacgtgagcacaagataagagaacgaaaaatcagcagcctatgcagcgacaaatattgatagcctgaatcagtattgatctgctggcaagaacagactactgtatataaaaacagtataacttcaggcagattattatgttgtttatcaagcctgcggatctccgcgaaattgtgacttttccgctatttagcgatcttgttcagtgtggctttcctagtccggcagcagattacgttgaacagcgcatcgatctgaatcaactgttgatccagcatcccagcgcgacttacttcgtcaaagcaagtggtgattctatgattgatggtggaattagtgacggtgatttactgattgtcgatagcgctattaccgccagccatggtgatattgtcatcgctgctgttgacggcgagtttacggtgaaaaaattgcaactacgcccgacggtacagcttattcccatgaacagcgcgtacagccccattaccatcagtagtgaagatacgctggatgtctttggtgtggtgatccacgtcgttaaggcgatgcgctgatgtttgccctctgtgatgtaaacgcgttttatgccagctgtgagacggtgtttcgccctgatttatggggtaaaccggtggttgtgctaagcaataatgacggttgcgttatcgcccgaaacgctgaggcaaaggcgcttggcgttaaaatgggcgatccctggttcaaacaaaaagatctgtttcgtcgctgtggcgtggtttgctttagcagcaattatgagctttacgcagacatgagcaatcgggtgatgagcacgctggaagagctaagcccccgcgtcgagatttacagtattgatgaggcattctgcgatctgacaggtgtgcgtaattgtcgcgatctgactgattttggcagagaaattcgcgcaacggtgctacaacgtacccatcttactgttggtgtggggatcgcccagaccaaaacgctggctaagcttgccaatcatgcggcaaaaaaatggcagcggcagacgggtggggtggtggatttaagtaatctggaacgccagcgtaaattaatgtctgctctccccgtggatgacgtctgggggattggacggcggatcagcaaaaaactggacgcgatggggatcaaaaccgttctcgatttggcggatacagatatccggtttatccgtaaacattttaatgtcgtgctcgaaagaacggtgcgtgaactgcgcggcgaaccctgtttgcaactggaagagtttgcaccgacgaagcaggaaattatctgttcccgcagctttggtgaacgcatcacggattatccgagcatgcggcaggccatttgtagttacgctgcccgggcggcggaaaaacttcgcagcgagcatcaatattgtcggtttatctccacgtttattaagacgagtccatttgcgctcaatgaaccttattacggcaatagcgcgagcgtaaaactgctgacgcccactcaggacagcagggatatcattaacgctgctacgcgatctctggatgccatctggcaagcgggccatcgttaccaaaaagcgggcgtgatgctgggggatttcttcagtcagggagtcgcgcagctcaatttattcgatgacaacgcaccgcgccccgggagtgagcaattgatgacggtaatggatacactgaatgctaaagagggcagaggaacactctattttgccgggcaggggatccagcaacaatggcagatgaagcgagccatgcttagtccacgttatacaacgcgaagttctgatttactgagggtcaaataaatatagcggcaggaaaaaagcgctcccgcaggagcgccgaatggattagcgaccgaacagatcacgttttttcgctttaaacggctgggaaatcaccaccagcactgcgacaatcaggtaagcgataaaaataccgagcagccactgcggcatttccagacctaaaaaatcccactgacgctcggcgcaatcgccagaggcgacaaacacttgcggcacccacttatccagcggcagccattccgggaaacgaaccataaaatcacaggtggcaaacgggctaggatagagctgaagcatggtgtgctcgtaagttaactgcacaccgcggaacgcactatacaaccagataaccatcgctacataacgcagcggagttttcggggcgatcgcgccaatcagcgcagcacccagaacgccgaataacgcgcagcgttcataaatacagagcacgcaaggtttcagtaacatcacatgctggaaccacagcgccgtcagttccagtgccagagcagtaaacgccatcaacagccacgcgccccggccttgactacattggttcaaaaatcgcaacataatcatttccctgcaatatgcatagagtgcgcagtttaaaccaattcattcgctgcgccaccaggaggcagcaaaaataggacgcaattggacaattatcgggcgaaaaggcaaaccgggcatttatatgcccggtaagttgttatcaaagcgttgctatccagcccatttgcataaaccattcggttacaggggcaagcgtaaactcgacgcagagcaagccgacgagtgtcaggacgagggtgtaaggcagggccatccacaccatgcggccataagagaggcgaatcaatggcgcgagtgcagaggtcagcaggaacaggaacgcagcctgaccgttcggcgtagcgacggagggcagattggtaccggtattaatggcgaccgccagcagctcgtattgcttcaacgtgatagcgccactttccattgccgctttcgcttcgttgatataaatcgtccccacgaagacgttatcgctaatggaactcagcagaccgttgaaaatatagaacaggctcagctgagcatgttcgcttgcctgcaacacaaactgaataattgggctaaacagttgttggtcgataatcaccgcgactacgctgaaaaacaccgtcaacagtgcggtgaatggcagagattcggtgaaggctttaccgatagcatgctcatcggtgacaccggtcaaacttgttgccagaataatgacactcaaaccaatcaagccaacttccgccagatgcaacgccagcgcagtcaccagccagacgccaataatcgcctggacaatcagacggattttatcctgacgggtacgctggtggcggctttgatcgtcaaactgttgcaacacttcgcggactttctccggcagcgtttcaccgtagccaaaccaacgcagcttctctaccagcaggcaggttaacaggccacaaatcagaaccggaacggtcaccgggctcatgcgcaggaagaaatcgccaaaatgccagccagccgctttagcgatgatcaggttctgtggttcgcccaccatggtcattacgccgcctaatgcggtgccgacaccggcatgcatcatcaggctacgcagaaagccacggaactgttccagaaccactttgtaatgcttgtcgatatgactatcgtcttgcaggtcggtgtcttcggtacgggaagaggctacgcggtgataaataccataaaaaccgactgcaacgctgatcaccaccgccacgacggttaaggcatcgaggaacgcggagaggaacgcagccgccacgcaaaaagagaggctcagcagcattttggagcgaatgcttaacagcaaacgggtaaatatgaacagcaacagctgtttcataaaatagatacccgccaccataaacatcagtaacagcaagacttcaagatttgccgccacctcttcacggacgtgttccgcgctggtcatgccgatgaataccgcttcgatagccaacagaccaccggggagcagcgggtagcatttcagggccatcgccagagtgaaaataaattccgctaccagcaaccagcccgcgacgaaagggctgatgaggaaaattaacgggtttacgattaagaaaatgatgagggcgagtttgtaccagtcgggggactggcccaaaaaattgcgccatagcgcgcggccccaggagatctccatgatggtttcccttaccttacaaataatcaatgatgtttttatgtttaaacgcaaagcttaacggtcaggcaggagtgaggcaagtcttgatagtcaaggggaaagagatgcggaaaatgaagccttgatccctttttcttctttttgtctgctatcagcgtagttagccctctggtatgatgagtccaactttgttttgctgtgttatggaaatctcactatggtcattaaggcgcaaagcccggcgggtttcgcggaagagtacattattgaaagtatctggaataaccgcttccctcccgggactattttgcccgcagaacgtgaacttagtgaattaattggcgtaacgcgtactacgttacgtgaagtgttacagcgtctggcacgagatggctggttgaccattcaacatggcaagccgacgaaggtgaataatttctgggaaacttccggtttaaatatccttgaaacactggcgcgactggatcacgaaagtgtgccgcagcttattgataatttgctgagcgtgcgtaccaatatttccactatttttattcgcaccgcgtttcgtcagcatcccgataaagcgcaggaagtgctggctaccgctaatgaagtggccgatcacgccgatgcctttgccgagctggattacaacatattccgcggcctggcgtttgcttccggcaacccgatttacggtctgattcttaacgggatgaaagggctgtatacgcgtattggtcgtcactatttcgccaatccggaagcgcgcagtctggcgctgggcttctaccacaaactgagcgcgttgtgcagtgaaggcgcgcacgatcaggtgtacgaaacagtgcgtcgctatgggcatgagagtggcgagatttggcaccggatgcagaaaaatctgccgggtgatttagccattcaggggcgataatcccttccgtttaaagagcaaacccctcaaacgaggggttttttgttgtttttacagatttcccattcttggcgggcaacgttccagcaactcgatgctgccgtcttcgttttgctgttcgagcatcacatcaaatccccacaggcgatgcacatgcttcaggacttctttgcgcccccgatccagcggtgcgcgattatgtggaatataacgcagcgtcaggctacggtcgccgcgcaaatccacgttccagatctgaatattcggctccagattacttaagttatattggctgcttaaccggttacggatctcccgataaccttcttcattatgaatagcggaaatctccagataattatgccgatcgtcatccagcacggtgaagaagcggaaatcacgcatcactttcggactcaggaactggctgataaaactctcatctttgaaatcacgcatcgcgaaatgcagcgtttccagccagtcggaaccggcgatatccgggaaccagtatttgtcttcttccgttgggctctgacaaatccgtttaatatcctggaacatggcgaacccgagggcatacgggttgatgccgctgtaccacgggctgttataggggggctggaagaccacattggtgtggctgtgcaaaaactccagcataaaacgttccgttactttcccttcatcatacagatggttaaggatggtgtagtgccagaaggtcgcccagccttcgttcatcacctgagtctgtttttgcggataaaaatactggctcaccttacgcacaatacgcaggatttcacgctgccaactttccagcagtggcgcatttttctccataaaatagagcaggttttcttgtggttcggacggatagcggcgcgcttcagcaaccgttttctcttcctcgcgcttcggcagggtacgccagagcatattgacctgactttgcagatactcttcgcgacttttctgccgggctttctcttcttgcaggctgattttttgcgggcgtttgtaccggtccacgccgtagttcatcagcgcgtggcagctgtccagaagccgttctacttcatcaacgccataacgctcttcgcactcggtaatatatttacgggcaaaaatcagataatcgacaatgctactggcgtcggtccagctacggaataagtaattgtttttgaagaaagagttatgcccatagcaggcatgagccatcaccagcgcttgcatggtaatggtgttctcttccatcaggtaagcgatacacgggttagagttaatgacgatttcataggccagtccttgctgaccgtgcttatacagccgttcagtctcgataaactttttaccgaaactccagtgcggatagttaattggcatgccgacgctggagtaggcatccatcatctgttcactggttatcacttcaatctggtgcgggtaggtatccagccggtagagtttcgccacccggtctatctctgccagataaacatccagcaggtcgaacgtccagtcgggtccatcgctcaaacgtgtggtgtccttattcatagaatcgatcgtcgccatacgcgcacctcattgttgtcggcgctctctgtgtggagcacctcatttcaagcatagaacacctgttaaaaaccgcgtcgccggagaatttttttctttgcgatttcttattatcagagtgccactaatccgcttctgaacggaattttatgctggataaaaagggcgttcagcaggagatactaaagacgccatattgccgcagagtcagggagatgtgagccagctcaccataaaaaagccgcatgttgaataatattttcaactgagttatcaagatgtgattagattattattcttttactgtatctaccgttatcggagtggctatgcgagttgtcatactgggaagtggtgtggtaggcgttgccagcgcctggtacttaaatcaggcaggacatgaggtcaccgtcattgatcgggagccgggggccgccctggaaaccagtgccgcgaatgccgggcaaatctcccccggatatgctgcaccgtgggcggcaccaggtgtgcctttaaaagcgattaaatggatgttccagcgccatgcgccgctggcggttcgtctcgacggtacgcagttccagttgaaatggatgtggcaaatgttacgtaactgcgacaccagccactacatggaaaacaaagggcggatggtgcgtctggcggaatacagccgtgattgcctgaaagcattgcgcgccgaaaccaatattcagtatgaagggcgtcagggtgggacgctgcaactgttccgtaccgaacaacagtatgaaaatgcgacccgcgatatcgccgtgctggaagatgccggcgtaccgtatcagctgctggaatccagccgcctggcggaagtggagcccgcgctggcagaagtggcgcacaaactgacgggcggcctgcagttacccaatgatgaaaccggagactgtcagctatttacccagaatctggcgcggatggcggagcaggcgggggttaaattccgctttaatacgcccgttgaccaactgctttgcgacggcgagcaaatctacggcgtgaagtgtggcgatgaagtgattaaggccgatgcgtatgtgatggcgtttggttcttacagcacggcgatgctcaaaggcattgttgatattccggtgtatccgctgaaaggctacagcctgaccattccaattgcgcaggaagatggtgcgccggtatccaccattcttgatgaaacctacaaaatcgccattacccgtttcgataaccgcattcgtgttggcggaatggcggagattgttggttttaataccgagctgttgcaaccgcgtcgtgaaacgctggagatggtggttcgcgatctctatccacgcggcggtcatgtcgagcaggcgactttctggactggtctgcgcccgatgacgccagacggcacgccggttgtcgggcgtacacgctttaaaaatctgtggctgaataccggtcacggcacgctcggctggacgatggcttgcggttccggtcagttgttaagcgatctgctctctggtcgcacgccagcgatcccatatgaggatctaagcgtagcgcgctacagccgtggatttacgccaagtcgtccgggccatttacatggcgcacacagctaaggaaacgagatgacccgtccgatacaggccagcctcgatctgcaggcattaaaacagaatctgtccattgtccgccaggccgcgacgcacgcgcgcgtctggagcgtggtaaaagcgaacgcttacgggcatggtattgagcgtatctggagcgcgatcggggccaccgatggctttgcattgcttaacctggaagaggcaataacgttacgtgagcgcggctggaaaggaccgatcctgatgctggaaggatttttccatgctcaggatctggagatttatgaccagcaccgcctgaccacctgcgtacacagcaactggcagctcaaagcactgcaaaatgcgcggctaaaagcaccgttggatatttatcttaaagtgaacagtgggatgaatcggttgggcttccagcccgatcgcgtgcttaccgtctggcagcagttgcgggcaatggcgaatgttggcgaaatgaccctgatgagccattttgccgaagcggaacatcctgatggaatttccggcgcgatggcgcgtattgagcaggcggcggaggggctggagtgtcggcgtagcttgtccaatagcgcggcgactctgtggcacccggaagcgcattttgactgggttcggcctggcattattttgtatggcgctagcccgtccggtcagtggcgtgatatcgccaataccggattacgtccggtgatgacgctaagcagtgagattattggtgtccagacgctaaaagcgggcgagcgtgtgggctacggcggtcgctatactgcgcgcgatgaacagcgaatcggcattgtcgccgcagggtacgccgacggttatccgcgccacgcgcctaccggtacccctgttttagtggacggcgtgcgcaccatgacggtggggaccgtcagcatggatatgctagcggtcgatttaacgccttgcccgcaggcgggtattggtacgccggttgagctgtggggcaaggagatcaaaattgatgatgtcgccgccgctgccggaacggtgggctatgagttgatgtgcgcgctggcgctacgcgtcccggttgtgacggtgtaacttgttgtaagccggatcggaggcaacgtcttctgggtgcaaaaaaatcatccatccggctggtcagcaactgtagttgttaatgtgacagagccattgcccatgatagtgtccattaaaaggatggacactatttccccggaacctgaactcaccgcacaggcgttctacataaaacgcttacgcttcattgttgactcgaactcgacttcagataaatcacgctttacccttgatggagcctgtacatagatttgtgtaattgcctgattttgatatgttcaattcaacatcaaatgaaggttaaattatggacgacaaacaattgcaggctcaggctgcgttcagcaaagcatcgcaaccggcgatagatgcttcattaaatttaagattcagcttcctcttcagccacccgtacgccaatcttcaacacttcattatcttctttctcggccaccgtccagatcatcccggcaaactctacctggtcaccgacaaccggtgccgcgcctaacaactgctggacaatttcacccagcgtttgctgcttatcacgatattctcgcccgtcttccaggccatatatcagcgcaacatcagcatatttggcgctggcttcgagaatgaagtcaccaaagaagcgttgatccagcgcgaccggcgggctctggctgaacagtttaccgagcgccggaagatcgcgttcccgaccaattacacacaacacatcgccttcgcgcagtcgggtgctgccggtaggatgaagcaactggttatcacgaaacagtgccgcaatacgcgtctcttttggcatatgcaaatcgcgcagtgccgcgcccacgcaccatttatcggcactcaattgataaacaaactgctcccacggattttccggatgaatatccaggccaacgcgactcaccggacgtcccactggcggaaccaccactttggcttttttagccgcccagctgagacttgttccctgcaagagcagactaaccagaaccacaaagaaggcgacattaaagaacagacgtgcattctccagccccgccatcatcgggaacacggccaggatgattggcaccgcgccgcgtaatcctacccagctgataaacacgcgctcacgcagattgaaaccgcggaaggggagcaatccagcaaatacgctaaggggacgggcgaagaatatcatccatgcggacaaaatgagcgccggaatggcaataggcagcagatcgcttgggttaaccaacagccccagcaccaggaacatggcgatttgcgccagccaggcgaggccgtcgaaattttgcaggatgccgtagcggttgcgaatagggcgattacccagcagaaaaccgcacagatacaccgccagaataccgctaccttccagcgcagtagttaaactgaaaatcagaataccgccacttaatgccagcaatggatataatccggcgggcagggcgatgcggttgatcatttgcagtagtaaataaccgccgccaagacctattacaatgcccagaccaaattgttgcagaatatcgacaatgaacatccagctaatattgctctcatgatgctggatcatcgcaattagggtaatcgtcagaaagaccgccattggatcattactgccggattcaatttccagcgtgctgccaacacgttcgttaagccccttaccacccagcagagaaaagaccgctgcagcatcggtagagccgacgatagcgccgattaataagccttcaatcaaatcaagattaaacagccacgccgccatcatgccggttaaaccagaggtgataagcacgcccagcgtcgccaggctcagtgccggtcctaacgccacacgaaaggaactggcctgagtgcgcatcccgccgtcgagcaaaataatcgccagtgccaggttacttaccatgtaggcgaaggggtaattatcaaacgggataccgccgacgccatcgactcctgccagcatgccgatcgccagaaaaataaccagaataggaatgccaagacgggaagaaaaactactaagtaatatactgctggtgacaaggatggatcctaagatgaaaaggctaattattgttgtggcatccaacggtcggttactcctgattacgctgtctcttatataaaccctaccatattagcggcagagacagcgttttacttagccctgaagcgtgatttttttacattttaagaacaggatgaccgctaatcgtcaactgagtgccttcccgggtgttattcagaatggcatgtgcgcccaacggcagcgtaaccgtgcgttgttcatgaccaaaatcgaggccggtaatgagtggaatgctcaggcgggaacgcaaaaacgcgtacacactctccaggttgtaacctgcgtcataatcattgggcgtgctgccgctaaagctaccgagaataatcgccttctgacgtggcaaaattcccgcatgatagagctgcaacagcatacgttcgacccggaaagggtgctcgttaatatcttccagcaccagaataccgttctcaatttttggcatccacggtgtaccgatcagactaatcagcatcgcaagattgcctccccacaacgtgccttcggcccgacatgtcgggccttccccttgccattcaatggtgaaggtttcattgcgtaacgccagccagaaatggtgctcggtaaaggcgttcagttcatccgcgccaaagtttgctaccagcatggggccgctaaaggtgatgacattgccatgcgccagaagaccgcactgaatggcggtaaaatcgctatgtccgcaaatgagcaacgggtcatgttgttggcgagccaccagtgcctgccagtcaatatctgccagtaaacgactggcaccgtaaccgccgcgtacagccagcacgatggtgttgggggtagtcagtctggcaagggaattgagatcttccagacgctctgtttccgtacccgcaaaacgctcacaacgacgggcaataacctcgacgttattgacttgatgccccgcgtcggtaaggcgctggataccacgcagcgcggcgtgctgtttaatgcagtaaccgcttggggcaattaagtgaaacagagacatggcaattccttgctgacaacagaaacgaaatgtatatcatgccgcttaggtgtgccgttgtcacctcaacggcgattccaggctataaggatagaagaagtgaaattgagatggtttgcctttttgattgtgttattagcgggttgtagtagtaagcatgactatacgaacccgccgtggaacgcgaaagttccggtgcaacgtgcgatgcagtggatgccaataagccagaaagccggtgcagcctggggcgtcgatccacaattgatcacggcgattatcgctatcgaaagcggtggtaatccgaacgcggtgagtaaaagcaatgccattggtttgatgcagttaaaagctagtacctccggacgtgatgtttatcgccgtatgggctggagtggtgagccgacgaccagcgagctgaaaaatccagagcgtaatattagtatgggggcggcttacctgaatattctggaaaccggcccgctggcaggcattgaagatccgaaggtactgcaatatgcgctggtggtgagttacgctaacggggcaggtgcgctgctacggactttcagcagtgatcggaaaaaggcgatcagcaaaatcaacgatttggatgctgacgagttcctcgaacacgtagcgcgaaatcaccctgcgccgcaggctccgcgctatatctacaaacttgagcaggcactggacgcgatgtaaatcagtcgcgcactttgtccgctttttcccgggcttctcgctcgagagagaaaataatccgctgtaattgccgctccaccgtcgggctgacgttaagaaaacggaagctcagacggggagtggtgatggtttcattcttgccatcaatcactttgcgctcgctgatggagattaactgggcgtcaaagtgaaaaacaccccattgccccatgttgacttcaatctgagcgaagcgcatgccttcttgtaattcggcaggctttgctgtttccagtaatgcgcccatgccgcctaagctcaaatcatacaggcggaaacgtaacgtactgttatccgccagtttggtctggcaaaaataaggcggatggagtggggcggagatgcggaaatatcggcgtcgttgtacaaaccataaggtgggaggcggtacggtaataaatgccggaagctgcaagtattcactctgctgtagttgttcaacagtaaactcgactttcgcaccctgagtttcggcggtaatggtaatgtgctgtgcctttagcacggcgatgttgtcttcggcttgactgccgaaatccagcaccagtttatccggggttattgccagtaatttgctgatcagctgcccgccattccaactgagacgcaaaggaattgcggctttgtgcaaatcgcgtaacacgcccaggacggctaacggattttgtttcaggaactgctcatggtaatgactcacgcggaaaaactcctgactgacaaactgtctttggtttatcggtcacagttaacaaaacttaatacaaatgcgtgaatattttttacatgttgttcttaaatcagccgacatacgcccagcatcgatcccgcccttgcctatacttagagcgttgatgtaagcatttcttgcgtccgattcatcgaaacgagggcctgaacatgggaattattgcctggattatttttgacctgatagccggcattatcgccaagctaatcatgccggggcgtgatggtggtggatttttcctgacctgtattctcgggatagtcggtgcggtggtcggcggctggctggcgaccatgtttggcattggcggctccatcagtggttttaatctgcacagcttcctggtggcggtggtgggagctattctcgttctgggcatattccgcctcctgcgaagagaataagattttcataaggcggatagcgatacagatgccgctatccgctttcacatcagaacgtatactcgacacctgctttacgggtgaaaaaaatcaatatagcacttcgatatccgataaagtcggttcccggtaacaacaacagaatccttttttaattattgtttcgttgtttttggtgtgattcagaaaataaatattttagacagtagccagagtggcgttaaaaatggggcggatagtgaggcggttttggctgcgcttattgaacatttagaattgatcaatccttctggcagattaagccaaaatacccgtagcgcaatgcttcagttacgcgaagaggaatggtctgaattctttttttggttgctaaattctctggagtgtctggattatgtgattattaatttaactccagaaagcaaaaaaacgttgatgagtgaacaccgtaacaatattcaggtagcaattgatgctttatatagccaacgtcggcgtaaaagcccgggtgatgaaagtgaaacacttacccgtagaaatgacgctatcttcggcaaccacgtatggcaaacatttgcgcaatacttcccgccaggacttgaaaaaccgtctgtgtaaaaaaaaccatagctatggtgttatctgccgacaacgccatccggagaagccgaatgacgttgtcggagtaagcgctggttaaggtgtgggttgtgcctctttggtactgggttgcgtcgttgcactcttaacggtcggacgcgtcgccggaacattgtcacacggttgctctttcgggcagatcaaatccagcattttcagcgtcacgccattggtccagccaaagccatcctgtaatggatattcgccaccgccgccccccgttccggtggtgctgacatcatatttttccaccagctttttctcccggtcataggtgtgctgaacattggtcaggaagtgccagctaatgtccatcgccacctctttttgcccgtagttttgtaatccttctgtcgcgacccactgtaacggtgcccagccatttggcgcatcccattgttgcccacttttcacgctcgtggtgttcaggccgccgggttgcagcagatgtgttttcgtcgccgtcgccattttgttggcgcgatctttcgctgccgcattgacgtacagcgggaacagggcggccgcggttaactgattgcgcactttatgacttttcaggtcgtaatcggcataccagccttgttgatcgttccacaggtatttttcgatccctttttgacgggcatttgccagcgtttcgtactggtttgccatcgcgttatctccggcagctttgctggcgcgggcgaggattttttccattttaaacatcaggctgttcagatcgaccggtacgatgctggtggtgcgtaaggtatttaactgctgcgggttgtccatccagcggctgctgaaatcccagccagacgcagcggcagagcgcaggtcgcggtaaatttcagtggcaggtcgattcggattgcttttggcggtggcaatatcttccacccaactctctggtcgtggcgtatcgcgatcgtcccagtagcggttgagaagggtaccatcctgaagtttgacaacgcgtttttcctgttgtccggcttgcaggttttcaacaccgtccatccagtaagcatattctttttgcatttgcggcaggtattgcttcaacgcggcatcgccttcatgctgcgccagtaactctaccatcagggcaaagaagggcggttggctgcggcttaaatagtaactgcggttgccgttgggaatatgaccgtaagtgtctatttcatgagcaaaattggccaccatatccgcgactttatcccagtgaccgctttcggcaagtcctaacatggtgaagtaactgtcccagtaatatacctcgcgaaagcgtccgcccggcacgacataaggttccggcagcggtaacagagaatcccatttttcggtgttttcggtagaacgcgttaataccggccaaagtccgtcaatatgttcgcgcagactctgcccctctggcggaacatatttctcgccttctttcggcagggtgaaattgacgttaacgaaatggcgcagatcaaatccgctctggttttgctgcatccgataatcagcaaggatcatcagcggatcgctgttcggcacggcatcggcaaaggttttttggtccggaaaaagtttggcgttttgcacatcattaaacagcggccctaataaaatatcaggcggctgtggtgttaccggtgtttcttctgcctgcacgcttagcgcagcgaaacacaaaaagatacaggctggaattaacgccattttttgcgggcgagaaggtgcgggggatttcatcaatcattctcctttggcgaaaccgaataaaacggtattcaagtatcagaaaaccttagttcaggatcgcactagctgcatgatcgaaatctcattctgcgaactgtcaggcattttagaaaagggaattaaagggataaataacggcgaaatagagtgatcaaataacgtctgtttattagccagccagcggcgttgggttcgtgattagcgaagaaaaatcatcataaattggtgaaaaatataacaggtagttaaaaaccattagtgctgagtaaattgccggatgacatcagaacgatgccatccgaacagtggcttaaccctgacggttgaaacgttgcgttttaacgtccagcgttagcgtttcttctggttgtatcgcatacagtttctcaccctgctggcaaatccagccaatccccagttcacgggcgattagggcgctgtgggataccggacttccggcgctaaggcagataccttttacaaccgccggatccagttgcagtactgtggaaggataaatgttctccgccagtagaatagttgggctgttaaactgcgggagttcttctttcgtttgggtcaggtggaccagggtgcgatgcagaagatcgtccacatcaatatagcgagcttgtagatattcatcatccagttgctggtattgctggctaagttctttaagaacttgctgccaggcatattctgccgtgcaatgttcatgctgaaggagttcgcttgccgccgccagcagttccggatcatctaacagtgtatggtgaccagaaaagattgcggcaatatcgtcaagcccgctggcttctgctttcgctgttaacgtcatcagatctaataacgtgaagtcaatagcctggcgtaatcgatcttgttcttcttccacggtcagggtactttttgcctgtaccgtacataaaactggttgataataaaaggctttaccgctaacaggcggaacgggacgcagagtaggtggagcgacttcctccgtttcaccaaagttatcttcagccagctgacggaaagcgatcagtgcctcttcagcttctggccctttcgcaatcaggcgcagcgtatcgttatagcgaacttgtagtaacgcaatctggttaatactctctggtgtgacgcatttgccgtttttttccagcaacatatcggcattaaatgtgcttaaggtataaaccagccgggaggccggacgtacatgcaggccgttacggttttttatgaccaccgccagagaacgggcttcttcatcgtacgcaggacatgtgtcagagatttcagtgtcggaggacggtaaacccagttgttcacgtttggcttccagcgcatgcatggcgtcaaagataactttgtcgatatccgccccgctggccgcgctgaccgttgctgccagtgtaccttcgaccaacggcgcagcacacaaacgtacttttgcggcgatctcgggagccagcaattccagcgcagtttcagcactcaataatgcgctacccatatccatcatgaccagcacatggtcggcatcagcaacagattcgatggcctccatcactttgacggcatcggtaccaatgggattttgtggatcgtcaattcccgcggcaatggcgattttacaactatcactcattaacatctgacgggctaattcaccgacaccttctcccagtcggctgctatgactaactatgaccaggtttaccatcaccaattccttactcttttgcggctaacgccaacatttgcatcataaacatcacgctggtcgcgccgggatcctggtgaccaatactgcgttcaccgagataactggcgcggcctttgcgggcttgcatcgtaatcgtactttgtgcagcggattcggcgatgctactggcagcttcgagcgccaccggaacagagagattttgctcgctggactgacgtaagctttccaccaccggcacccacacatcacacatggttttatcgccaggttcggctttcccgcgactgattacgccgtccgcgccatcgcggaacatctgataaagctcttccagtgtcaggctttgccgtgcctgggtcgcctgtgcggcgcggataaagaaggtaccgaacagcggaccactggcaccaccgacgctggaaagcagcgtcataccggtattcttgagaatgaaaccgatatctttatctgcgatagcagggagtttttccaccactttgctaaagcctcggttcatatttagcccgtggtcagcatcgccaatttcgcgatccagtccggtaagatactcgctctcggtgctgaaaatatcgccacaacgagtgagccagttaacaatttgagttctgctcagactcattgctttctccttatttaccccagttaagggccggggtgtggaccggggcgtcccagagtgccagcgtttcgtcatcaactttcagtaaggtgatactgaaaccggtcatatccagactggtgcagtacgcgccaattaaattacgttcgatagtcaatcccgcttgctggcaacgtgtggtcaggcggttatagacgccgtacagctcagaaagcggagttgcgccaagattgttaaccagcgcaatcacccgatcgccagactggagcggttgtttggtttgttgttcttcctgccaactgccttgttgataatcccagaaacgcaaagtgcgatggtaactgccatttaccagcagggtgtcgaacatttcatcgacggtttgatcaagggaagagaaggggcggcggtcaatacccggctcaccatgaatgccgacgccaaactccatctcattatccgccagggtaaaagaaggtttgcccgcggcaggaacggtacaggcaccgagagcgatacctatactgtggccttgattattcagcttacgccccagttccgcacaggcgtccagactgtcgccacgctccgccgctgcgcctacgagtttttcaattaatacggtgttggcaacgccgcgtcgcccggcagtataaagactgtcttttaccgcaacgtcgtcatcaatgaccacagtggtcacttttacgccgctatcgtgcagtaactcggtcgctgtttcaaagttaagaatatcgccggtgtaatttttgataatcaacagtacaccttcgccgccatcaacttgcatggcgcattcaaagattttatcgggcgtcggactggtgaaaatttcgcccggacaggccccgctaagcatcccctgaccgatataaccacagtgcatcggctcgtgtccgctgccgccaccgctcagcagggcgacttttcctgcaacaggggcatcagctcgggtgacatacaccggatcctgatgcagtgtcaggcttggatgcgctttcgccagtcctgccagttgttcgtccagtacgtcttgcacatcattgatcaattttttcattattttgctccagcaattacggtagggcatggatgatgttcaacgacacggcgaccactgactgccgatgaatccattgtgcatcaggcaagggaaaagaaaattagcccaaattatgtttcatagtgaaacatatgctttaatgaatgttccatattgaaacttttacgtgtattaatacttaaaattgcgagccggaacaccttttgtcataagggatgcgggatatgagtggcgcttttaacaacgatggtcggggcatatctcccttaattgcaacctcctgggagcgatgcaataagctgatgaaacgggagacatggaacgtaccacatcaggcccagggcgtgacatttgcttctatttatcggcgtaagaaagcgatgctgacgctcgggcaggctgcgctggaagatgcctgggaatatatggcaccgcgagagtgtgcgctgtttatcctcgatgaaaccgcctgcattctcagccgtaatggcgatccgcaaaccttgcagcagctaagtgcactgggattcaatgacggcacgtattgcgccgagggaattattggtacttgtgcgctaagcttagcggctatctctggtcaggccgtgaaaacgatggccgatcaacatttcaaacaggtactctggaactgggccttttgtgcaacgccgttgtttgacagcaagggccgattgacgggaacaatagcgctggcgtgtccggttgagcaaactaccgcagctgatttgccgttgacgttggcaatcgcccgcgaggtcggaaatttactgctgacggacagtttgctcgctgaaactaaccgtcatttaaatcaacttaatgccctgttagaaagtatggatgatggcgtgattagctgggacgagcagggtaatttgcaatttattaatgcccaggcggcgcgggtcttgcgccttgacgcgacggcaagtcagggacgggcaatcactgaactcttaacgttacccgccgtattgcaacaagcaataaaacaggcacatccgctcaaacacgtagaagcaacctttgaaagccagcaccagtttattgatgcggtgataacccttaaaccgataatagaaacgcagggaaccagctttattttgttgctccatcctgtggaacagatgcggcagttgatgaccagtcaattaggaaaagtcagccataccttcgctcatatgccacaggacgatccgcaaacccgccgcttgattcattttggtcgccaggcggcgcgcagtagctttcctgtcctgctttgtggagaagagggcgtgggcaaggcactgctaagtcaggcaattcataatgaaagcgagcgtgctgcaggtccttatatcgccgtcaattgtgagttatatggtgatgctgcgctggcggaagaatttattggtggcgatcgcacggacaatgaaaatggccgtctgagtcggctggaactggcacacggcggcacgctgtttcttgaaaagattgaatatctggcggtggagttacagtctgctttgcttcaggttatcaagcagggggttatcacgcgactggatgcgcggcgtttaataccaattgatgtcaaagtgattgcaacaacgaccgcggacctcgcaatgctggtggaacaaaatcgttttagtcgccagctgtattacgcgctgcatgcatttgaaattaccatcccgcctctgcgtatgcggcgtggcagcattccggcgctggtgaataacaaattacgcagtcttgaaaaacgcttctctacgcggctgaaaattgatgacgatgccctcgctcgcctggtttcttgtgcatggccaggcaacgattttgaactttacagcgtcatcgagaatcttgctctgagtagtgataacgggcgcattcgcgtcagtgatttgccggaacatctgtttaccgagcaggcgacagatgatgtcagcgccacccgcctttccaccagtctgagttttgcggaagttgaaaaagaggcaattattaacgcagcccaggtcacaggcggtcgcattcaggaaatgagcgctttacttgggatcggccgcactacgctgtggcggaaaatgaagcaacatggcattgatgcagggcagtttaagcgccgggtatgaaagacagaaacgatttctgatacatcagagtgatctgtatttcattccggcgcacgctaacaattttcagcatcgtttaagggcttgtctatcccgcacttaaaagctgaagcgatatcctccgttgacttgcttctgatcaaagaggttaccctgcgtgtaatccgcttcgagatagaatgtgtgctgtttgttatactgtgcactgactcccacgccgttattccagccattacctttgaaactgtacttctcccgggagttgttcaacagatattcggtatccccactaaactcgcggatagcgccagtcttcacatagacattcagctggctgttgcctgcggtgatgtcataccccagtatcatgctggcacgccccagcaggctttcgtagtgattcagatgtatattgaggccattactcgccttcatagtcatctcattctggtggctgtatgtaagctgggtttgcggctctatatagaacccataaccagtaggggacaggttgaacctctgcccggcttccagggagatgctcattccattcgcagtgccgttggcgttaacgccgttgttctgactgtccagtacgtggaaactatttttctggcggcttgcttttataacgagatcgctgtaaaaaccgttttgtgccatgtaactggcgtacattcccatgtagtcactacgtgcggtaccgtcgcctccgctatagtccgggcttgcatgtgtactgccaatatacagaccgacatacaacggcattacatcagagagacgtttatccccaccaaactggataccgctgtaacccatgtcaaagccgctcagtttgccactggcaaaggagtccaggcttcccccataactgcgcaaccagatattaccgtctttactctgatttcgcaggtcacccatccgttgcatcagcgtacggttttcaacatagttcaataagtaaccgacattgagataattgccgccagcatctgcggtcgtggtgggtttaggcgtgggagcgggttcaggcgtaggatcggggttgactatgggaggctgagcgggagctggtgtgggttcaggattaggagtcggttccggaactgtcccggaagcgtaaagctcccagttagtgccatttttacgcacatcgtacagatatccccccaactcaacctgagaagacgcgctgaagctggccgcgccgtcagtggtttttaccactgtcagaacttcatttcccgttgtggcctcgctgccctggttgcggatagccaatacgtgattaccagcactactcccgctgatattcaataaatcccctttattattaacgccattaccctcgccaacaacatcagcacgcataataaaggtactgttaccgctcaggttctctacgtttaatgtggcaaatgtgccggcagtactcccgtggctggcaaaatcgacagtactatggctcagcgccagcgtgtcgagattagaattacttgttacgttccagacgctgttattcattgcaacgtccagttttccgccattgacattatcgctgagggaggaacctgtccaaacgttcccagggtgcatatccagattgattagcccacctttggaaagaacgctaccgttgataagcatacgaccgctggcgttgatgcggctggcggcataaccatcgtcatgttgcgttgcgatggccatctggtcgggtgtactcatatcaatgaccagatcgctcgtgaggtcgatctggctgttggtcatggcataaattcccctggctcctgccgcgccggtgatagccaaactgtctccggttattctaccgccgctgagagcccacaaacccagcgccagactgccattacgatcaactgtaatatcggtattttgcatgttgacaacagccgttgccgtctgggcgctggcaccataagaaccgccggaaaagatgctgtttcgttgcgctgccgtgccagtaaaattgattatcgcgtcactaccactggtgacgaggccaccgccctgcgcggaagaaatatggctatctgcaccgatagtggttgtaccaccacgaacttcgacgccattggccgcggctccagttacatcaacagtgagtgcattcgcgctaacctggccaaagctccagaggccgtgagcattatcgccattggttttaatggtactgtttgttccgagatcgacaacagagtttttctgtacgtttatccccatggcgctgtagccctgaacatcgattgtcaggtctgtagccgtaaaacgcgcagcaccattggcgttattgccgttgagaccaccgatataaacacctgtacttccatcggtcgtgattttacttccgcttccaagatcgacactggtgccatagtcattgatggttaggcctataccgttgctgttttcaatggtgaattgagtggctgttagtgtactgctatgcccaataatgatgccgtcatcgttactcttaatggtgctgcctgtgcctaagtcagcatgggtatagtcaccaattaagttaatgccgatggcagaggtttgaccaacaacatctactgtgagtcggttagctgtcagggagctgtttttgccctgaataatgattccttttgcatatccagaggcgtcgttgacattgacggtgacatcattacccaggttgatattgccaggcgtgtttcctgctggggtcattacaccatagaggtttccacttggatcggcggtatctcctgtaattctgtcaccatcattaatagtaatattggtgccatattgacttcctgtatcagcagctatcagcaggggggaaaagataattgcattcaaaccaatagcgccaaattttatcagttgaatactggggctacggatttttaattcagcgagacgatctgctttggtattcccattgtgttgtttgatgcccataccactcctatatagtacccagactatgggtctatggattttgtcattttgtttaaatcaatgaataatatcctcttatcatcatgatatttgtatggtgcaatcatgatgagcttctcagagaataattctctattaccgggcaaaatcaggaacacaggaattaatatatatttaacatcccccttacaaaggtgagtttatatcgagttattccctaagttgtcgttacttattccaattcgttactataaatatggcaaaaatattacaacaaacagcggttaaaaaatttggtgaagattttttgtaataatcctaattagttatgggaatttcgcttgatgtatctgcataacaaaaacaatatgcgccatttttgcattactaataagaaaaagcaaaaaacatcgatattcatttttggtcaatgggttttctggcctatcgttgttattgtgctactggttatcattttcatcttgccagcatattggagcgtgatcaattttgatcagctgtgaagggggctgatgtgtagtgatacaaaaacttacgttatatcactgctaatgagatatccggcatctgaacacttatgtctttaattattctcgtggttcactataggcaataagcacaaaagtgtaggatgttacaagaatgattaggactcggtgaaatgaaaaatccacgcaattgcgtggattttatatacttttgcgctcttcatgagatttagcgaaacctcatgagacaataaattaattagacgttgaaaaggaagttcatcacatcgccatctttcacgatgtaatctttaccttctgcacgcattttgcctgcttctttcgcgccttgttcacctttgtaagtgatgaaatcttcaaagctgatggtttgtgcacggataaagcctttttcaaaatcagtatggattttgcccgctgcctgcggcgcggttgctccaaccggaatggtccatgcacgcacttctttcaccccagcggtgaagtaagtttgcaggttcagcagtttataaccggcacggatcacacggttcaggcccggctcttccagcccaagctcctgcataaactcgtcacgttcttcgtcgtccagttcggcaatgtctgcttcaacagcagcacaaaccggaaccacaacagaaccttctttcgccgcgatttcacgcacctggtcaagatatgggttgttttcaaaaccgtcttcgttgacgttggcgatgtacattgttggtttcagcgtcaggaagctcaggtaacgaatagccgctttctcttcagcgcttaaatccagcgcgcgcagcatacctgcattttccaactggggcaggcatttttccaggaccgccagctcagctttcgcgtctttatcgccacctttggctttcttctgtacgcgatgaatcgcacgttcgcaggtgtcgaggtctgccagcgccagttcggtgttgataacttcaatatcgtcagccgggttaactttgccggaaacgtgaatgatgttgtcattttcaaagcagcgaacaacgtgaccgatcgcttcggtttcacggatgttggtcaggaactggttacccagaccttcgcctttgcttgcgccttttaccagaccggcgatatcgacaaattccatggtcgtgggaagcgtacgctgcggttttacgatttcagccagttgatccaggcgaggatcaggcattggtacgacgcctgtgttcggctcaatggtgcagaatggaaagttggccgcttcaataccggctttggtcagcgcgttgaacagggtagatttcccgacgttgggcaaaccgacgataccgcatttgaatcccatgatttaaatcaccttaatatcttaataatcaacctgttattgctaacagattgcagaaatggaaataactttgcctattatacacggcactcggcaaaaatgccgcagacaacgacttattgcgctttaaaggcgtgcaatcggttcgttgctttggtcaagccatctgtaaaccacatttcagtacaacgcgccgcttcgtcaatggcttcatcaattaacttctgttcactaacaggcggtttgcctaacacaaaaccgacaactttatttttatcgcccggatgaccgattccgatgcgtaaacggtgaaagttagggttattacccaatttactgatgatgtctttcagtccattgtgaccaccatggccaccgcccaatttaaatttggcgacgccaggaggcagatccagttcgtcgtgggccaccagaatttcgtccggattaatgcggaaaaaactggccatcgccgcaacggctttgccgctgagattcataaatgtagtcgggactaacaggcggacatcttcgcctccaagagtgactcggctagtataaccaaagaatttagcctcttcgcgcagcggagcgcgcaaacgctctgccagtaagtcaacgaaccaggtaccagcattatgtcgcgttgcggcgtattcagcaccggggttcgccaggccgacaatcaatttaatcgtcacgtttttttgtcctgagtgtgtacataactggcgcgtagtttactggttgcggccccgcttgacaaaaaactgcgtatcaaatgcagataacgtaataattgcctgagtggactattagaaagtcaaggtgttcaggcgtttatttgtaaagttttgttgaaataagggttgtaattgtgatcacgcccgcacataacccactgggtgttgtctatactttacacataaggaagaggggtattccctgttacaacccagaaagttccggaggtgacatatgaaacgcaaaaacgctagcttactcggtaacgtgctcatggggttgggtctggtggtaatggtggtcggcgtggggtatagtatcctcaaccagttaccacagtttaatatgccccagtatttcgcacatggtgcagtgctaagtattttcgtcggtgccattctctggctggcgggtgcccgtgttggcgggcatgaacaggtgtgcgaccgttactggtgggttcgccactatgacaaacgttgccgccgtagcgataatcgccgtcatagctaacaaataatgcagtttgctgaccagtcagtttgcgctgactggtcaatctcgtacttataaatccgccatcgccgcgcgacgattcgggaagaacgccaggcgtcccgggatcggttgaatgccagcgcgagccatagtgcgcagtggctggaattccacgttgcacacgcgcagttcacatccctcgggcagacgcttcacaaaacgctggaacgcatcaagaccaccagcatcaagtaccggaacggcatcccacttcagaatcacaatccgtttgccttcaagacgactctccaggtccgtgaataagccttcagcagcagcaaaaaacagcgggccaataacgcgcagaaccaggacatcgtctggaacatctacgactaccggtgccaggcgagtcatacgtgcgatacgacgcataaacagcaggcttgccagcacgatccccacgctgatggcaataaccatatcaaacaacacggtcaggctcatgcacagcagcatgacgatgatgtcatctttcggcgcatgacgcagcaagtcgaccactttgtgcgcttcactcatgttccacgccaccatcaacagcagggctgccatggcggaaagcggcagccaggagagcagcggtgccagtaccagcagggcaagaataaccagaatagagtggatcaccgcgctgataggggacgttgccccggcacggacgttagcggcagaacgcgcgatggcagctgtagcggtaataccaccaaagaacggagcgataatattccccagtccctgtccaaccagttcgctgttcgccttgtgtttcgtcccggtcataccatccagcaccacggcgcagagcagagattcgattgcgccgagcattgccatactgaatgccgcaggcagcagtgtgcgaatagaatcccaggttagcgtgaattcactattaggcagatcccacggcagcaccagttgcggcagcagttgcggaataccgttaccctgagaaccatcggccaggacgtagtggaattggctaccgatggtagcaacatgtccgccgagcaggttaacaatccccatcaccgcgcaaccagccagcaaggccggaaggtgaccgggtaaacgaatgcccagacgcggccaaaaaacaagaatacctagcgtcacaatgccaatggcagcatcacccacattaatggtcggcagcgccataaataatgcgccgactttttgtagataatgttccgggacatgggccatttgcagaccgagaaaatctttaatctgcatggtaccgatggtgatcccgataccgctggtgaaacctaaggtgacggaaaccggaatatactcaatcaggcgaccaaagcgtgccagacccatcagaatcaaaaagatcccgctcagcaaggtcgcaaccagcagtcctgccagtccaaactgttggctcacgggatagagaattaccacaaatgccgcagtcggaccggaaacgctaaagcgactcccacccgtcagagcaatgacaatccccgcaacagctgcggtatataaaccgtactggggtgccacaccactaccaatagccaacgccatcgccagcgggatagcaataatcccgacggttatcccggcaatcaggtcacgggtaaaccgtgcggcagtatatttttctttccagcaagcgtcgatcagagcgcggaaaggcatcacatgactggaaaatattttgttcacaataatgtttcatccgtgagcgcatcatctgtcaactaaatggcaggtgaaggaggcataggtcatacaaatggatattacagacaaaaaaacccgccgcagcgggtctttgagccgggttcgattagtgttcgaacatggcagagatgctttcttcgttgctgatacgacgaatcgcttcggccagcataccactcagggtcagagtacgcacgttcggcagacttttgatttcatcgctcagcggaatggtatcgcagacaacgacttcatcaattacagagttacgcaggttgttcgccgcgttgccagagaagatcgggtgagtcgcgtacgcaaatacacgtttagcaccacgttctttcagagcttcagcagctttacacagcgtaccgccagtgtcgatcatatcatcgaccagtacgcagtcacgacctgcaacgtcaccgatgatatgcatcacctgactaacgttcgcacgcggacgacgtttgtcgatgattgccatatcggtatcgttcagcagcttagcgatagcgcgggcacgcacaacgccgccgatgtccggagaaaccacaattgggttatccagattcagctgcagcatgtcttccagcaggatcgggctaccaaatacgttatcaaccggaacgtcgaagaaaccctgaatctgttcagcgtgcagatccactgtcagcacacggtcaacaccgacgctggagaggaagtctgcaaccactttcgcagtgattggtacacgagcggaacggacgcgacggtcctggcgcgcatagccaaagtaggggataacagcggtgatacgacctgcggaagcacgacgcagggcatcaaccataacgactaattccatcaggttgtcgttagtaggggcacaagtggactggatgatgaaaatatcaccaccgcgtacattttcattaatttgtacgctgacttcgccatcgctaaagcgacctacagcggcgtcgccgagactagtgtacaggcggttggcaatacgttgtgctagttccggggtggcgttaccagcaaaaagcttcatatcaggcacgagaagaacctcaggcatgcgtccattggtggaaagaatctgccgaaaactgtgcgggccaggcatgatcctttccaggcggtgtattaaagagcgcgatgcaacgtctggaacaaggtgacgttgtcaccgaaactcagcttgcccggcttaaagcatggctctgtgcaatggggaaagattagcgcctttcgccacaaagccattgagccattccggggcttgctctagcacctggcgggcttcagactctgtatcaaattcagcaaagacacaggcccctgtcccagtcaggcggctcggggcgtattctaacagccaggaaagcaccgcatcaacctcgcgaaaacgttttcttgcgataacctcgcaatcattgctgaattcacattttagcaacgtttctatactcctttttggcgtattgcgcgggagttcaggatctttaaaaatcaccggagtcggaatacttacaccagggtgcgccaccagataccacttctctggcggatccaccggcgttagtatttcaccaacgccttcggcaaacgcggcatgcccccgaacaaagacaggaacatctgcgcccagcgtcagccccatttccgccagctcatccatgcttagcccgcattgccagagatgatttaatgccaccaggaccgtcgcggcattggaactaccaccgccgagaccgccgcccatcggcaaacgcttgtcaatgctgatattcgcaccgcttcccgtcggaagacgcccgctgtctgccgcagttttcatcaacaatcgcgctgcgcgaacgatcaggttatcttcatgttccacgccttcaacgggcgttaacagacgaatatccccatcgtcacgaagctcaatgctgatggtgtcgccgtaatcaagaaactgaaacagcgtttgcagcgtgtggtaaccatccgcacgctgaccggtaatgtataaaaacagattaagttttgccggagagggccactgtgtccgcattatttcactatccagttatccatttttaacttgatgcgttgaccaccgtcggtgagttccatattggctggcatcgcaggttgcgttttggtgtcataaccaccataaacaaccttccagtttttgccattctggctgtaggtaatttcgctcaggcggtactggtcgtccagtttgtagtcggttgcatcacccggtaaacctaaaatccactggcgcaagctgttgagcggaattggcattccggtcaatttgccaatcatctcttcggcgtcatcggcggtataacgctgacctttattgtcgactaactgcacgttacccggttgagcattcagctccagttccgtgctgcccaatgggttagtgagcagcagacggtagcgatcctggccggtttgctgccagaaaaagcgggcgtacactttttgttggtcagaaatataagcgaacgcgccgcgagtctgatactgattaagattgcgcacgtcttgctgatgctgacgccattgtgggctatccgggcttttgccaggacctttgggcgtggtaacggaacaggcagtgagcacaagagcagccagcggtagcaggcggataagacgaaaatcgggcaggggcatagtgatgacaagtccttgagatacgttgcagttataacccttaatgctagcgttaccgtccgctatcgtctatgttcaagttgtcttaattgccagaatctaacggctttcggcaattactccaaaagggggcgctctcttttattgatcttacgcatcctgtatgatgcaagcagactaaccctatcaacgttggtattatttcccgcagacatgacccttttagcactcggtatcaaccataaaacggcacctgtaagcctgcgagaacgtgtaagctttagcccggataagctcgatcaggcgcttgacagcctgcttgcgcagccgatggtgcagggcggcgtggtgctgagcacgtgcaaccgcacggaactttatcttagcgttgaagagcaggacaacctgcaagaggcgttaatccgctggctttgcgattatcacaatcttaatgaagaagatctgcgtaaaagcctctactggcatcaggataacgacgcggttagccatttaatgcgtgttgccagcggcctggatagtctggttctgggggagccgcagatcctcggtcaggttaaaaaagcgtttgccgatagccaaaaaggtcatatgaaggccagcgaactggaacgcatgttccagaaatctttctctgtcgcgaaacgcgttcgcactgaaacagatatcggtgccagcgctgtgtctgtcgcttttgcggcttgtacgctggcgcggcagatctttgaaagcctctctacggtcacagtgttgctggtaggcgcgggcgaaactatcgagctggtggcgcgtcatctgcgcgaacacaaagtacagaagatgattatcgccaaccgcactcgcgaacgtgcccaaattctggcagatgaagtcggcgcggaagtgattgccctgagtgatatcgacgaacgtctgcgcgaagccgatatcatcatcagttccaccgccagcccgttaccgattatcgggaaaggcatggtggagcgcgcattaaaaagccgtcgcaaccaaccaatgctgttggtggatattgccgttccgcgcgatgttgagccggaagttggcaaactggcgaatgcttatctttatagcgttgatgatctgcaaagcatcattagccacaacctggcgcagcgtaaagccgcagcggttgaggcggaaactattgtcgctcaggaaaccagcgaatttatggcgtggctgcgagcacaaagcgccagcgaaaccattcgcgagtatcgcagccaggcagagcaagttcgcgatgagttaaccgccaaagcgttagcggcccttgagcagggcggcgacgcgcaagccattatgcaggatctggcatggaaactgactaaccgcttgatccatgcgccaacgaaaagtcttcaacaggccgcccgtgacggggataacgaacgcctgaatattctgcgcgacagcctcgggctggagtaacagtacatcattttctttttttacagggtggaggaggaataatggaatatcaacactggttacgtgaagcaataagccaacttcaggcgagcgaaagcccgcggcgtgatgctgaaatcctgctggagcatgttaccggcagagggcgtacttttattctcgcctttggtgaaacgcagctgactgacgaacaatgtcagcaacttgatgcgctactgacacgtcgtcgcgatggtgaacccattgctcatttaaccggggtgcgagaattctggagcttgccgttatttgttagcccagcgaccttaattccgcgcccggatacggagtgtctggtggagcaggcactggcgcggttgcctgaacaaccttgccgtattctcgatctcgggacgggtaccggggcgattgcgcttgcgctggctagcgagcgcccggactgcgaaattatcgctgtagatcgtatgcctgatgctgtctccctggcacaacgtaatgcccagcatctggcgatcaaaaatatccacattctgcaaagcgactggtttagcgcgctagccgggcagcagtttgcgatgattgtcagcaatccgccgtatattgacgagcaggaccctcatcttcaacaaggcgatgtccgctttgagccgctcactgcgctggttgcggcagacagtggaatggcagacatcgtgcatatcatcgaacagagccgtaacgcgctggtatccggcggctttctgcttctggaacatggctggcagcagggcgaagcggtgcgacaagcatttatcctcgcggggtatcatgacgtcgaaacctgccgtgactatggtgataacgagcgcgtaacgctcggccgctattatcaatgacaagtttttctacactgcttagtgttcatcttattagtatcgcgctttctgttgggctattaaccttacgtttctggctacgttatcagaagcatccacaggcatttgctcgctggacgcgcattgtgccgccggttgtcgatacgctgttactgttaagcggcattgcgttgatggctaaagcgcacatcctgccattttccgggcaggcacagtggctgactgaaaagctgtttggagttatcatttatatcgttttgggttttattgcactcgattatcgtcgtatgcacagtcagcaggcgcgcattattgccttcccgctggcgttggtggtgctgtacatcatcattaaactcgccaccacaaaagtaccgttactggggtaagtcatgagaagcttagctgatttcgaatttaataaagcgccattgtgcgaaggcatgatcctggcttgcgaagcaatccgccgcgattttcccagccaagatgtttacgacgaactggagcgtctcgttagtctggcgaaggaagaaatcagccagcttctgcctttagaagagcagttggaaaaactgatcgcgctgttttacggcgactggggatttaaagccagtcgcggtgtttatcgtctttccgatgcattatggctggaccaggtgttaaagaatcgacagggcagtgcggtaagtttaggtgcggttttattatgggtcgcgaatcgtctcgatttgccgctgctgccggtgattttccctacgcagctgatattgcgcattgaatgtccggatggcgaaatttggctgattaatccttttaacggtgaaagcttaagcgaacatatgctggacgtatggttaaagggaaatatcagcccgagcgcggaactgttttatgaagaccttgatgaagctgataacattgaggtaatccgcaaattgctggatacactcaaagccagcttgatggaagaaaatcagatggagctggcgttacgcaccagcgaagctttattacaattcaaccctgaagatccctatgaaattcgcgatcgcgggttgatttatgcgcaactggattgcgaacacgttgcgttgaacgatttaagttatttcgttgaacagtgtccggaagacccgatcagcgaaatgatccgtgcgcaaataaataacatcgcgcataaacatattgtgctgcattaattaatcgacattttactcaagattaaggcgatcctatgaaacaaaaagtggttagcattggcgacatcaacgtagcaaatgacctgccgttcgtactgtttggcggtatgaacgtgttggaatctcgcgatctggcgatgcgcatttgcgagcactacgtaactgtgacccagaaactgggtatcccttacgtgttcaaagcctcttttgacaaagccaaccgctcctccatccactcttatcgtggaccgggcctggaagaagggatgaaaatcttccaggagttgaagcagacttttggcgtgaaaattatcaccgacgttcacgaaccaagtcaggcacagcccgttgctgatgtcgtggatgtgattcagttgccggcgtttcttgctcgccagactgacctggttgaagccatggcgaaaaccggtgcggtaattaacgtcaagaaaccacagtttgtcagcccgggacagatgggtaatatcgttgataaattcaaagaaggcggcaacgaaaaagtgattctttgcgatcgcggtgctaacttcggctatgacaacctggttgtcgatatgctgggcttcagcattatgaagaaagtgtctggtaacagcccggtgattttcgacgtgacccacgcactgcaatgccgcgatccgtttggcgcagcttccggtggtcgtcgtgctcaggtggctgagctggcacgagccggtatggcggtaggtctggcggggctgtttattgaagcgcatccggatccggaacatgcgaaatgtgatggtccatccgcgctgccgctggctaaactggaaccgttcctcaagcagatgaaagcgattgatgatctggtgaaaggtttcgaagaactggataccagcaagtaatcttttttgcttgaaaaataaagtattagcgttctgcgttaagacttttttcatgggtgccggatacaaaaaaggccgcaggctgttacccctgcggccggtttcgggcgcatattgccatcacggcagcctgacgcccgttttcaccttacttccggttacgccaccagctgacaatcgctgcggtaataattcccgccaggatcggtgctgccaggtcgtgccagaaaatcatggcaaactgcgcgagcgtcatatagccgccttgttgtaatgacaacattttgcggctattcttgaattgttctggttcaagattagcccccgttctgttgtcaggttgtacctctcaacgtgcgggggttttctctttccagcaaccaatgccaccagggataaagcccccgcaacattgcgcctcaccggataacgccggcttggtgtggatactacgactcaattcatcttcacttcatccctgaaatgtttgcaatgaagagtgcattccggtttttcaacagctgttacagtcatttcatgagtgctctggatgaggcttccagctcgggttgccaatatttacttgtggaagtgataaagacaaaaatggccgcaggctgttacccctgcggccggtttcgggcgcatattgccatcacggcagcctgacgcccgttttcaccttacttccggttacgccaccagccgacaatcgctgcggtaataattcccgccaggatcggtgccgccaggtcgtgccagaaagtcatggcaaactgcgcgagcgtcatatagccgccttgttgtaatgacaacattttgcggctattcttgaagtgtctggtttcaagattagcccccgttctgttgtcaggttttacctctcaacgtgcgggggttttctctttccagcaaccaatgccaccagggataaagcccccgcaacattgcgcctcaccggataattccggcttggtgtggatactacgtctcaattcatcttcacttcatccctgaaatgtttgcaataaagagtacattccggcttttcaacagctgttgcagtcgtttcatgagtgctctggatgatgcttccagctcgggttgccaatatttacttgtggaagagataaagacaaaaatggccgcaggctgttacccctgcggccggtttcgggcgcatattgccatcacggcagcctgacgcccgttttcaccttacttccggttacgccaccagctgacaatcgctgcggtaataattcccgccaggatcggtgctgccaggtcgtgccagaaaatcatggcaaactgcgcgagcgtcatatagccgccttgttgtaatgacaacattttgcggctattcttgaagtgtctggtttcaagattagcccccgttttgttgtcaggttttacctctcaacgtgcgggggttttctctttccagcaaccaatgccaccagggataaagccccgcaacattgcgcctcaccggataacgccggcttggtgtggatactacgtcgcaattcatcttcacttcatccctgaaatgtttgcaatgaagagtacattccggcttttcaacagctgttgcagtggtttcgtgcagggtgtggtacaggctcgcaattctgattaacgacctgtccaggtagtatgaagaaatacaataagcaggaatttatattatctcccccgattaccgtcatcggaggagatataactgtcaggcaaatatcgtcatcaaataggcggcaaacagtgccagatgcgctgcgccattgagcatgttagtacgtccggtggagaaggagatatggcacagcactaaagaggccaccatcaccaccatttctggcgcaccaagtgcaaactgcaattcgttacccgtcataaaggcaattagcgtgacgacaggtacggtaaggctaatggttgctaacacactaccaaagaacagattcatcgcgcgctgaacctggttgttcaacactgcttttaatgcacctaaaccttccgggctcagaatcaacagtgccaccaggaagccagtaaaggcgacaggggcattcatgctgtcgagcaatgtctccaggctgctggcgttcattttggtcaccgcaataacggcaatcagatggataatcaaccagatagcatgccacaggctgctatgggcagacggtttaccgtgatgcgggtcgtcatcatcactgtcatcttcgtgctcgtagacaaacaaactttgatgcgttttggtctggatcagcaaaaatacgccatacattgccgcagaaattaatgctaccagtaacgcctgaccggtactaaaattcgccgcaggcagagccattggaaataccagtacgattatcgccagggggaacagcgcaattaaatactgcttgataccaaacagattcatatattgggtggcaaacttacgaccgcccaacaataaactaaagccaaccagcccaccggtaacaatcataatgatactatagagcgtatcacgcattagcgttggcgcggcgtcgccggttgccattaaagcactaatcaaactgacttcaagaataaccacactaaggctaagaataaggctaccgtaaggttctcccaggcgatgggctaatacgtccgcatgacggacaacactaaaggcgctacttaaaataccaataagcgcaagaagattgatggcaatgaccactggtagtgtctggctgcttccccacaggaacagcactaccagcgccagaaccgggaaaataaggctagtctccttgtggcgggtttttaccgcctcttgagcattactcattatggttatccctttgcagatgaatttatcgaaaatgtaaaaaataggtaggaaaaataacagaaagtgtctggatatcggtaacattttacgaatttttaccccgctgtcgattttttactcattggggcataaaaataagtattacgtttagacaatgtttgttttagcgtctcttaagaagagtctgacctgaaaattcttatgttttggcaagagtagatattgttgaccacacttaatgttcaactttgtaaaaggagtcaacgatgccgtataaaacgaaaagcgatctgccggaaagcgtaaagcacgttctaccgtctcatgcccaggatatctataaagaagcgttcaacagcgcatgggatcaatataaagataaagaagatcggcgtgatgacgccagtcgcgaagaaaccgcgcataaagtggcctgggctgctgtgaagcatgaatatgccaaaggggatgatgataaatggcataaaaaaagctaaaaccggtcgcttagttaaagctattcgtgcggtgttgccttgcaagtggtccgtggattgcatattgtcccgttagtggtttcaaaatgagcagtaaaaatgtccggaagacaccaaaaagttgtcgcagggaagtatgcagtggcggaagtgtaaggtgataacgcgtgatttcttgatgaatgccgattgtaaaacggcatttggtgccattgaagaaagtctcttatggagtgcagaacaacgggcggctagcctggcggcgacgctggcttgtcgacctgatgagggaccggtgtggatcttcggctatggaagcttgatgtggaatccggcactggagtttaccgaaagctgcaccggtacactggttggatggcatcgcgcattttgcctgcgcctgaccgccgggcgcgggactgcgcaccagccgggacggatgcttgcactgaaagagggcggacgcaccacaggcgtcgcctatcgactgccagaagagacgctggagcaggaactaaccctgttgtggaagcgagagatgattaccggctgttatctgccaacctggtgtcagcttgatcttgatgatggacgcacagtaaacgccattgtgtttattatggacccgcgacatccagaatatgaatctgatactcgcgctcaggtcatcgcgccgttgattgcggcggcgagcggtccgctgggaaccaacgcacaatacctgtttagtctggaacaggagcttatcaaactgggaatgcaggacgatgggctgaatgatttgctggtaagcgtaaaaaaactgctggcggagaattttccggatggtgtgttacgtccgggattcgcctgagtaaacttcccgcatagtggggcgtcagacgccccctcaaacattaaaatgtgagcactttatcggcactcagcgtccattgcgccagttccacaagagtaccgatttccaccccatcaatcagaggaagtgtactaatcccgcgcccgtcggtacaggttttgcacaatttcaccggtacattctgagcggtaaggatctccagcatttgctgaatgttgtagccttcccctggtttttgcccgcgcaacccggctgtgaccgcatcagacatgaggaacagacgcagatccagattgctctcctgctctcgtaacgcaatggccagccgcaagctgttaaacaaggattcgctcccgtaaggtgcgccattggcaacgatcacgattttttgcattatttactcctgtattcagggaattagacactcatcttctatcttactgcttctgcagcgtctgaccaatcggtcacatttttaaggattttcctgaaagcgcgagaaaatacgacaaaagttgccagtaatcgttattctttaaggctatggtttttcattattaccggaagttaccgacgttttgagccgtttcgttcctcgcattatcccgttttatttactcttgcttgtagcaggcggtacagctaacgcacaatctaccttcgagcaaaaagcggcaaatccctttgataataacaatgatggtctgccggatttaggcatggctcccgaaaatcatgatggggaaaaacactttgctgaaattgtgaaagatttcggcgaaaccagtatgaatgataacgggctggatactggcgagcaggcaaaagctttcgcattgggaaaagtccgcgacgcgcttagtcaacaggttaatcagcacgtagagtcctggctaagtccgtggggaaatgccagtgttgacgtcaaagtggataacgaaggacatttcaccggcagtcgtggaagctggtttgtgccgttacaagataatgatcgttatctcacctggagccagcttggtcttactcagcaggataatgggttggtgagcaatgtgggcgttgggcaacgctgggcgcgcggcaactggctggtgggttataacactttttatgacaacttgctggacgaaaatcttcagcgagcgggctttggtgccgaagcgtggggcgaatatttgcgattaagcacaaacttttatcagccgtttgctgcatggcatgaacagacagccacgcaggaacaacggatggcgcgcgggtacgacctgacagctcggatgcgcatgccgttctatcaacacctcaataccagtgtcagcctagaacagtattttggtgatcgtgttgatttgtttaactctggtacgggttatcacaatcccgtcgcgttgagtctgggattaaattacacccctgtgccattagtcactgtgacggcccagcataaacagggtgaaagtggcgaaaatcaaaataacctcgggctgaatcttaattaccgctttggtgtaccgctcaaaaaacaactttctgcgggcgaggttgccgaaagtcagagcttacgtggtagtcgctatgacaatccgcagcgaaataatctaccgactcttgagtaccgacagcgaaaaacgttaacggtgtttctggcgacaccgccgtgggatctaaaacctggcgaaacagtgccgctgaaattacaaatccgcagtcgttacggtattcggcaactgatttggcagggcgatacgcagatattaagtttgacgccgggcgcacaagccaacagcgcggagggctggacgctgatcatgcctgactggcagaacggggaaggggcaagcaatcactggcgattgtctgtggtggtggaagataaccaggggcagcgtgtctcctccaatgagatcacgctaacgcttgtcgaaccgttcgatgcattgagtaacgacgaactgcgctgggaaccgtaatcagaaaatgcgctcctgatgcacccataccgctgcttccacgcgagacttgagcttcattttcttcagcatgtgcttgacgtgcacttttactgtgctttcggtgatatccaggcggcgggcaatcatcttgttcggcaaaccctgggcaatcagcttgagaatatcgcgctcgcgtggggttaactggttaacatcgcgctcagtagtggcacggttagcgcgcaagctggcggccagaacaggcgttaatgcttcgcttaataccatttcgccagcagctgcctgatgcaatgctttcagcagatcttccggttccatatcttttaacagatagccatccgcgccgcgtttcagtgcggtgaccacatcttcttcatggttagagacgctgaataccacaatgcgcccactgagggacttttcgcgcagtttatccagcgtttccagaccgttcatgccgggcatattgagatctaacaggatcagatcgggatcaagagactccgccagttcaataccctgttcgccattactcgcttcgccaaccacggtgatatctggtgccatactgataagctgttttacgccagttcgcagcatcgggtgatcgtcaatcagcaggatagtagccggttcctgattactcatgggtatctccttggacgtctgtgaaagttttttcgggaataaaggtgaccaccacttcggtgccaccactttcacgacggcggacgcggcaatcgcctcgtaaactttgcgcacgatcgcgcattattatcatgccgtagtgattgctgcggatggcattttcaggcacgccgcagccgttatcctggacggtcagtttgacctgattatcgttttgcgccaccgtcaccacgacttcactcgcttggctatgtttgagggcgttacttaatgcctcacgggcaatttgcaacaagtggattgcctgatggctaggcaccaggcgaggcggcaattgataatccagcttcaccgggaagccaaatttggcgctgtactcttcgcaactcgcctccagcgccggacgtaatccaggctcggtgagctgcaagcggaatgtggtgagcaattcacgcaactgcgcccaggatgcattcagttcgttacggatctgacttaacagttcgcggctgctttctggcagcgcatcgccctgcatctgtaaacaactcacctgcatcttcatgcaagagagagattgggcaatagaatcatgcagttcgcgcgcaatggtggcacgctcttccatcacgatcaactgttgctgacgttcctgatggcgatccagcgccagcgtggcggtgagttgttcaaccagggtatccaccagttgttgttgatcatggctaagatgacgcccctgcggcagggtcgccagcaaaataccgtactgcgtatgagagtcagccagccgccacttcagggtcgtgccgcgatcaccaacgggtaatacgccgcgcgggcagagctggcagcctttatcatcacaagtcatatctggctggcaggtaaactcctgatgattctcttcatcatcagtgtcatacacccgcaattcgatatcacgtagcagggttaaattctgtaagccgttgagtacaggactcaggcgttcacacagcggggcgcgggaatgcaaacggcggttagcctgccataaaaaagagaggatctgatttttatgctccagcccggcggttttctcctgaacccgctgctcaagtacggcataactttcggccagttctgcagacatattgttcaacgcagttccaagcatcgccatttcgttgcgcccgctgatgtttgcgcgttgggtaaaatcgcgatgactgacggcactcgccattgccagcagttgccgccacggttgtagcagtcgcgcccgcaaccagataatagtgaacaccagtaaaagtgccataaataccgccattacccgatggaccagtaccactgtctcgatgcgcatttccgtggtgcggtcaaaaccagataccagttgatcaagcccggcaacaaactggctgacatccgcactcaccgtttctcggttttgtgcacgcatcagcgcagggatcagttcattacgccagtaatcttgtaaaccctgtaattgcgccagttgtccgtctcgttctgctgctcgagtcaactcggcgctaaatgccgtttgttccatctctttaattaagggcttgtctttctcgcttaatggcactgccgccaacagacggtaactttgcatgcgcaggcttcccgctttgttgatcgcatgggcgctgccctgaacgccttgcaccagccagccagaaaccgccatccctgccagtccaatagcagtagaaagcaacacaataagcgcaacctgattaaccagggtgagcggagagagacaacgtttaagcatgtaaacctcttccttcaggctttaaatgagcaataaccttaatgaatgtgacgatacattctggaatggcagtattctcggctattggctgaagtatacccatacccggaaagagttactccttatttgccgtgtggttagtcgctttacatcggtaagggtagggattttacagcaccgtgaaaaatctcataatttttatgaagtcactgtactcactatgggtaatgataaatatcaatgatagataaagttatcttatcgtttgatttacatcaaattgcctttagctacagacactaaggtggcagacatcgaaacgagtatcagaggtgtctatgagtcacagttccgcccccgaaagggctactggagctgtcattacagattggcgaccggaagatcctgcgttctggcaacaacgcggtcaacgtattgccagccgcaacctgtggatttccgttccctgtctgctgctggcgttttgcgtatggatgttgttcagcgctgttgcggtgaacctaccgaaagtcggctttaattttacgaccgatcagctatttatgttgactgcgctgcctagcgtttctggcgcgttattacgtgttccatactcctttatggttcctatcttcggtggtcgtcgctggacggcgttcagcaccggtattctgattattccttgcgtctggctgggttttgccgtgcaggatacctccacgccttatagcgtcttcatcatcatctctctgctatgcggctttgctggcgcgaacttcgcatccagtatggcaaacatcagcttcttctttccgaaacagaagcagggtggcgcgctgggtctgaatggtggtctgggaaacatgggcgtcagcgtcatgcagttggttgctccgctggtggtaagtctgagcattttcgcagtatttggtagccagggcgtcaaacagccggatgggactgagctgtatctggcgaatgcgtcctggatatgggtgccgttccttgccatcttcaccattgcggcgtggtttggcatgaacgatcttgctaccagcaaagcctccatcaaggagcagttgccggtactcaaacggggtcatctgtggattatgagcctgctgtatctggcaaccttcggctccttcatcggcttctccgcgggctttgcaatgctgagtaaaacgcagttcccggatgttcagattctgcaatacgctttcttcgggccgtttattggtgcgctggcgcgttctgcaggtggtgcattatctgaccgtctgggcggaactcgtgtcacgctggtgaactttattctgatggcgattttcagcggcctgctgttcctgaccttaccgactgacgggcagggcggaagcttcatggcgttcttcgcggtcttcctggcgctgttcctgacagctgggctgggtagtggttccactttccagatgattagtgtgatcttccgtaaactgacaatggatcgcgtgaaagcagaagggggttctgacgaacgtgcgatgcgtgaagcggcaaccgacacggcggcggcgctgggtttcatctctgcgattggcgcgattggtggcttctttatcccgaaagcgtttggtagcagcctggcattaacgggtagcccagtcggcgcaatgaaggtatttttgattttctatatcgcctgcgtagtgattacctgggcggtatatggtcggcattctaaaaaataaaccgttactcgtcatacttcgggttacatgtgctgcggctgcgttcattcaccccagtcacttactttagtaagctcctgggattcattcacttgccgccttcctgtaaaccgaattatatagagtaaaatatttgattatcctttgcgcggcatgatgtcgcgctttttttatgcgtcatttagttacaacatactaatgttatatggtttatttcgccggatttcattaagagccattaatatgttacccatggggaatactccttaatacccatctgcataaaaatcttaatagtttaaataactacaggtataaaacgtcttaatttacagtctgttatgtggtggctgttaattatcctaaaggggtatcttaggaatttactttatttttcatccccatcactcttgatcgttatcaattcccacgctgtttcagagcgttaccttgcccttaaacattagcaatgtcgatttatcagagggccgacaggctcccacaggagaaaaccgatgagtaaattcctggaccggtttcgctacttcaaacagaagggtgaaacctttgccgatgggcatggccagcttctcaataccaaccgtgactgggaggatggatatcgccagcgttggcagcatgacaaaatcgtccgctctacccacggggtaaactgcaccggctcctgcagctggaaaatctacgtcaaaaacggtctggtcacctgggaaacccagcagactgactatccgcgtacccgtccggatctgccaaaccatgaacctcgcggctgcccgcgcggtgccagctactcctggtatctttacagtgccaaccgcctgaaatacccgatgatgcgcaaacgcctgatgaaaatgtggcgtgaagcgaaggcgctgcatagcgatccggttgaggcatgggcttctatcattgaagacgccgataaagcgaaaagctttaagcaggcgcgtggacgcggtggatttgttcgttcttcctggcaggaggtgaacgaactgatcgccgcatctaacgtttacaccatcaaaaactacggcccggaccgtgttgctggtttcagcccaattccggcaatgagcatggtttcttacgcaagcggtgcacgctatctcagcctgattggcggtacttgcttaagcttctacgactggtactgcgacttgcctcctgcgtctccgcaaacctggggcgagcaaactgacgtaccggaatctgctgactggtacaactccagctacatcatcgcctgggggagtaacgtgccgcagacgcgtaccccggatgctcacttctttactgaagtgcgttacaaagggaccaaaactgttgccgtcacaccagactacgctgaaatcgccaaactgtgcgatctgtggctggcaccgaaacagggcaccgatgcggcaatggcgctggcgatgggccacgtaatgctgcgtgaattccacctcgacaacccaagccagtatttcaccgactatgtgcgtcgctacaccgacatgccgatgctggtgatgctggaagaacgcgacggttactacgctgcaggtcgtatgctgcgcgctgctgatctggttgatgcgctgggccaggaaaacaatccggaatggaaaactgtcgcctttaataccaatggcgaaatggttgcgccgaacggttctattggcttccgctggggcgagaagggcaaatggaatcttgagcagcgcgacggcaaaactggcgaagaaaccgagctgcaactgagcctgctgggtagccaggatgagatcgctgaggtaggcttcccgtactttggtggcgacggcacggaacacttcaacaaagtggaactggaaaacgtgctgctgcacaaactgccggtgaaacgcctgcaactggctgatggcagcaccgccctggtgaccaccgtttatgatctgacgctggcaaactacggtctggaacgtggcctgaacgacgttaactgtgcaaccagctatgacgatgtgaaagcttataccccggcctgggccgagcagattaccggcgtttctcgcagccagattattcgcatcgcccgtgaatttgccgataacgctgataaaacgcacggtcgtagcatgattatcgtcggtgcggggctgaaccactggtatcacctcgatatgaactatcgtggtctgatcaacatgctgattttctgcggctgtgtcggtcagagcgggggcggctgggcgcactatgtaggtcaggaaaaactgcgtccgcaaaccggctggcagccgctggcgtttgcccttgactggcagcgtccggcgcgtcacatgaacagcacttcttatttctataaccactccagccagtggcgttatgaaaccgtcacggcggaagagttgctgagtccgatggcggacaaatcccgctataccggacacttgatcgactttaacgtccgtgcggaacgcatgggctggctgccgtctgcaccgcagttaggcactaacccgctgactatcgctggcgaagcggaaaaagccgggatgaatccggtggactatacggtgaaatccctgaaagagggttccatccgttttgcggcagaacaaccagaaaacggtaaaaaccacccgcgcaacctgttcatctggcgttctaacctgctcggttcttccggtaaaggtcatgagtttatgctcaagtacctgctggggacggagcacggtatccagggtaaagatctggggcaacagggcggcgtgaagccggaagaagtggactggcaggacaatggtctggaaggcaagctggatctggtggttacgctggacttccgtctgagcagcacctgtctctattccgacatcattttgccgacggcgacctggtacgaaaaagacgacatgaatactagcgatatgcatccgtttattcacccgctgtctgcggcggtcgatccggcctgggaagcgaaaagcgactgggaaatctacaaagccatcgcgaagaaattctccgaagtgtgcgtcggccatctgggtaaagaaaccgacatcgtcacgctgcctatccagcatgactctgccgctgaactggcgcagccgctggatgtgaaagactggaaaaaaggcgagtgcgacctgatcccaggtaaaaccgcgccacacattatggtcgtagagcgcgattatccggcgacttacgaacgctttacctctatcggcccgctgatggagaaaatcggtaatggcggtaaagggattgcctggaacacccagagcgagatggatctgctgcgtaagctcaactacaccaaagcggaaggtccggcgaaaggccagccgatgctgaacaccgcaattgatgcggcagagatgatcctgacactggcaccggaaaccaacggtcaggtagccgtgaaagcctgggctgccctgagcgaatttaccggtcgtgaccatacgcatctggcgctgaataaagaagacgagaagatccgcttccgcgatattcaggcacagccgcgcaaaattatctccagcccgacctggtctggtctggaagatgaacacgtttcttacaacgccggttacaccaacgttcacgagctgatcccatggcgtacgctctctggtcgtcagcaactgtatcaggatcaccagtggatgcgtgatttcggtgaaagcctgctggtttatcgtccgccgatcgacacccgtagcgtgaaagaagtgataggccagaaatccaacggcaaccaggaaaaagcgctcaacttcctgacgccgcaccagaagtggggtatccactccacctacagcgacaacctgctgatgctgactttaggtcgcggtggtccggtggtctggttgagtgaagccgatgccaaagatctgggtatcgccgataacgactggattgaagtcttcaacagcaacggtgctctgactgcccgtgcggttgtcagccagcgtgttccggcagggatgaccatgatgtaccacgcgcaggaacgtatcgttaacctgcctggtagcgaaattacccaacagcgtggtggtatccataacagcgtcacccgtatcacgccgaaaccgacgcatatgatcggcggctatgcccatctggcatacggctttaactactatggcaccgtaggttctaaccgcgatgagtttgttgtagtgcgtaagatgaagaacattgactggttagatggcgaaggcaatgaccaggtacaggagagcgtaaaatgaaaattcgtagtcaagtcggcatggtgctgaatctcgataagtgcatcggctgccacacctgtagtgttacctgtaaaaacgtctggaccagccgtgaaggcgtggaatatgcgtggttcaacaacgtggaaaccaagccgggccagggcttcccgactgactgggaaaaccaggaaaaatacaaaggcggctggatccgtaaaatcaacggcaaactgcagccgcgcatgggtaaccgtgccatgctgctgggtaaaatcttcgctaacccgcatctgccggggatcgacgattattacgagccgttcgattttgactatcagaacctgcataccgcgccggaaggcagcaaaagccagccgattgcccgtccgcgtagcctgattaccggggaacggatggcgaaaatcgaaaaagggccgaactgggaagatgacctgggcggtgagtttgacaaactggcgaaagacaagaacttcgacaacatccagaaggcgatgtatagccagttcgaaaacaccttcatgatgtatttgccgcgcctgtgcgaacactgcctgaacccggcatgtgtggcgacctgcccgagcggtgcgatttacaagcgtgaagaagatggcatcgtcctgatcgaccaggataaatgccgtggctggcgtatgtgcatcactggatgcccgtacaaaaaaatctacttcaactggaagagcggtaagtctgagaagtgcatcttctgctatccgcgtattgaagcgggtcagccgaccgtgtgcagtgaaacctgtgtcggtcgtatccgttatcttggcgtgctgttgtacgatgccgacgctattgaacgtgcagccagcaccgagaacgagaaagatctttaccagcgtcagctggacgtgttcctcgatccgaacgatccgaaagtcatcgagcaggcgattaaagacggtattccgctgagcgttattgaagccgcacagcagagcccggtttataaaatggcaatggaatggaaactggcgctgccgctgcatccggaatatcgcacactgccgatggtctggtacgtgccgcctctgtctccgattcagtctgcagcagacgcgggtgagctgggtagcaacggcattctgccagacgtcgaaagcctgcgtattccggtacagtatctggcgaatctgctgaccgccggtgataccaaaccggtactgcgcgcactgaaacgtatgctggcgatgcgtcattacaaacgtgctgaaaccgttgacggtaaagttgatacccgtgcgctggaagaggtcggtctgaccgaagcccaggcacaggagatgtaccgttatctggcgattgctaactacgaagatcgctttgtggtgccgagtagtcatcgtgaactggcacgggaagccttcccggagaaaaatggctgcggctttacctttggtgatggctgccacggtagtgataccaaattcaatctgttcaacagccgtcgtatcgatgccatcgatgtgaccagcaaaacggagccgcatccatgatcgaactcgtgattgtaagccgtctccttgaatatccggatgctgccttatggcagcatcaacaagagatgtttgaggcgattgccgcgagcaaaaatctgccaaaagaggatgcccatgcgctgggcattttcctgcgcgatttaacgacgatggatccgctcgatgcccaggcgcagtacagcgaactgttcgaccgtggccgcgccacgagtctgttgctgtttgaacatgtgcacggcgaatcccgcgaccgcggccaggcgatggtggacctgctggcgcagtacgagcagcacggcttgcagttaaacagccgcgaattgccggaccatctgccgctgtatctggagtacctggcgcagctgccgcaaagcgaagccgtggaaggtttgaaagatatcgcgccgattctggcattgctgagcgcgcgtctgcaacagcgtgaaagccgttatgccgtgctgtttgatctgctgctgaaactggcgaataccgctatcgacagcgacaaagtggcggaaaaaattgccgacgaagcgcgcgatgatacgccgcaggcgctggatgctgtctgggaagaagagcaggttaaattctttgctgacaaaggctgcggtgatagtgcaatcactgcgcatcagcgtcgctttgccggtgccgtcgcgccgcaatatctgaatatcaccaccggaggacagcactaatgcaattcctgaatatgttcttctttgatatctacccgtacatagccggggcggtcttcctgattggtagctggctgcgttatgactacgggcagtacacctggcgcgcggcgtccagccagatgctggatcgcaaagggatgaacctggcgagcaacctgttccatatcgggattctggggatttttgtcggtcacttcttcggtatgctgacgccgcactggatgtatgaagcctggctgccgattgaagtgaaacagaaaatggcaatgtttgctggtggtgccagcggcgtgctgtgtctgattggcggcgtgctgttgctgaaacgtcgtctgttcagcccacgcgtgcgtgcaaccactaccggagcggatatcctgatcctgagcctgctcgttatccagtgcgcgctgggcctgttgaccattccgttctccgctcagcatatggacggtagcgagatgatgaaactggttggctgggcgcagagcgtggtgaccttccacggtggcgcttctcaacacctcgatggtgtggcgtttatcttccgtctgcacctggtgctggggatgacgttattcctgctgttcccgttcagccgtctgatacacatctggagcgtaccggtggagtatctgacacgtaagtaccagctggtgcgcgctcgtcactaagcgaattttagttcacatagaccctgcttcggcggggtttttttatgggcacggtgcggggtgagttgtcggatgcgcttcgcttatccgacctacaggggaggatattgtaggcccggtaaacgtggtgccatcgggcaaaattagctcggagtaacaggttttgattatttaaggaagcgatggtggtgggggaaggattactcagcgctgcgcgcttcgcccttcgggtcgttgcctgcggcaacgctctcagcctggcgctcaagagcaaccttggtcgaagcttcagttccttccccgcttgggcagaatatttgattgcggatagctttgagaattccggggcttttgaaagtgatggtggtgggggaaggattactcagcgctgcgcgcttcgccctagcggtcgttgcctgcggcaacgctctctcgctgacgctcgagccgaaccttaatcgaagcttctcatccttccccgcatgggcagaatatttgattgcggattcgcttgagagttcagggacttttgaaagtgatggtggtgggggaaggattactcagcgctgcgcgcttcgcccttcgggtcgttgcctgcggcaacgctctctcgctggcgctcgagtgctaccttggtcgaagcttctcatccttccccgcatgggcagaatatttaattgcggattcgttgggaagttcagggacttttgaaagtgatggtggtgggggaaggattcgaaccttcgaagtcgatgacggcagatttacagtctgctccctttggccgctcgggaaccccaccaggggtaattcaaattttgaggtaatgcttgagatggtggtgggggaaggattattcgtcgcttcgctcctcacccttcgggccgttgcctgtggcaacgttctctcgctttcgctcgaatcgaaccttagtcgaaggttctcacccttccccgatgagtgcaaactttcacaatctcaccgaagttaccacatcgctgtggtgaattatggtggtgggggaaggattcgaaccttcgaagtcgatgacggcagatttacagtctgctccctttggccgctcgggaaccccaccacggggtaatgctttttactggcctgctcccttatcgggaagcggggcgcatcatatcaaatgacgcgccgctgtaaagtgttacgttgagaaaaatgaactggttgcgtaattttcatccgtaacggattaaaggtaaccagttatttttgctggcgattaaagaataatcgttcgattaccgtaaacaaagacgcgctgtgccagtactttgtatagtgcacgacttaagacgtttttctcgacgtcacgacctgcgcgcatcatatcttcagctgtgtaggtatgatcgacatgaataacgtcctgcatgatgattgggccttcgtccagattgtcattcacatagtgagcggttgcgccaataatcttcacaccacgttcataggcctggtgataaggacgtgcgccaataaacgctggcaggaaactatggtgaatattgatgatcttattcgggaagcgtgccacaaattccggcgttaatacccgcatatacttcgccagcaccacgtagtcaggttgataagcatcaatggcatccgccatcttttgatcgtgctcgttgcgggttaacccttcatggcttaccagctcaaacggaatatcaaaacgctcaaccagagaacgtaaagtatcgtggttaccaataactgccgcgatttcgacatccaggccgccgtaattggctttcatcaacaaatcgccaaggcaatgcgcttctttagtgaccagaatcactatccggcgacgaccggcaggattcagctcacgcacggagccttctggcaatgcgctatcgagatccgccagcagggtggaatcattaaaaatcccttccagttccgtgcgcataaaaaagcgcccggtacggtgatcaacaaattcattgttctgtacgatatttaactcgtgcttgtagcaaatattggtaatacgtgcgatcagacctttttggtccggacaaatagtacgcagaactttacgttggagactatgcattgctggaaaaaccttgttgagagtgtttgctaaaccgtaccgtcaaccattattggccgcagcactttttaaattttttaccactaccacaagggcagggatcgttgcgaccaaactgcggacgtgtaccgtcaatatagtaccattgaccgttttctttcaaaaatcggctacgttcaattattgcacctgttttaccaccttcggtaaatcgagcaacaaaactgacaaatccgatattgtcggcgtcctgccaacaatgttcaaatacggtcaatcccaaccattcagtatgcgcaaatccggccatcaattcggcacgtaacgccgctgctccacaagagggatgccaggtctttattaaataatctgcgtcttgcatcacaaaagcgcagtaacggctacgcatgagatgttctggatcaggtgcaaccttttcaccagacacataagggtggcaacataggctatactcgacagcactaccacagggacaaagctgagacacaaataatctccctggaaacaataacggcgtattaaccgcctgagtagcactatgttaaccgagcagtagcgatgtggctacgattgcattccaggggaatcttgcgggaataatgagaaagataaaaatagggctggcgctgggatctggcgcggcgagaggttggagccatattggcgttattaatgcgctaaaaaaagtgggtattgaaattgatatcgttgcaggatgtagtattggtagcctggtgggcgctgcctatgcatgcgatcgattatctgcgctggaagattgggtgacctctttcagttattgggatgttttacgcctgatggatctctcctggcagcgcggtgggttactgcgcggcgagcgtgtcttcaatcaataccgcgaaataatgccggaaacagagatcgaaaattgttcccgtcgctttgcggctgttgccaccaatttaagtacgggacgtgaattatggtttactgaaggcgatctccatcttgctattcgcgcaagttgcagtattccaggactcatggcacctgttgcacataacggctactggctggttgatggagcagtcgttaacccaattcctatttccctcacgcgtgcattgggggctgatattgtgatagcggttgacctgcagcacgatgctcatttgatgcaacaagatttgctctcctttaatgtcagtgaagaaaatagcgagaatggtgattctctgccgtggcatgcgcgtctgaaagaaaggttaggcagcataacgacacgtcgggcggtgacagcgccaacggcaacagagattatgaccacttctatccaggtgctggagaaccgccttaaaaggaaccgcatggcaggtgatccgcccgatattctgattcaacctgtttgcccgcaaatatctacgcttgatttccatcgcgcgcacgctgccattgcggccggacagctggcagtggaaaggaaaatggacgaacttttgccgttggtacgcaccaacatttgaccagaatttttatctacacttaagttaattctgacaggcgcaggtggcaatagcatgccactattgagtaaagccagtcaggggagagaacatgacgcagccattggtcggaaaacagattctcattgttgaagatgagcaggtatttcgcagccttctggatagttggttttccagtttgggagcgacaacggtactggcggctgatggggtggatgcccttgagttgctgggaggtttcactccagacctgatgatatgtgatatcgcgatgccacgaatgaacgggcttaaactgctggagcatatacgtaacagaggcgaccagaccccagttctggtgatatctgccactgaaaatatggcagatattgccaaagcgttacgtctgggcgttgaagatgttttgctgaaaccagttaaagatctgaatcgcttgcgcgagatggtttttgcctgtctctatcccagcatgtttaatagccgcgttgaggaagaggaaaggctttttcgcgactgggatgcaatggttgataaccctgccgcagcggcgaaattattacaggaactacaaccgccggttcagcaggtgatttcccattgccgggttaattatcgtcaattggttgccgcggacaaacccggcctggtgcttgatattgccgcacttagcgaaaacgatctggcattttattgccttgatgtcacccgagctggacataatggcgtacttgctgccttgttattacgcgcattgtttaacggattattacaggaacagcttgcacaccaaaatcaacggttgccagagttgggcgcgttattgaagcaggtaaaccatttacttcgtcaggccaatctgccggggcagtttccgctattagttggctattatcatcgcgaactgaaaaatctcattctggtttctgcgggtctgaatgcgacgttaaataccggcgaacaccaggtgcaaatcagtaatggtgttccgttaggcactttaggtaacgcttatttgaatcaattgagccagcgatgcgatgcctggcaatgccaaatatggggaaccggtggtcgactgcgcttgatgttgtctgcagaatgagcaaacgataacgcgggctaaatttgcattacctgctaatgtcggctggtggtactatcgtcgccattcgtataagtaattgtcttaattatgctaactcgcctccttttcagaacttagccccttcggggtgctgatatactgggatgcgatacagaaatatgaacacgttcaaaacacgaacagtccaggagaatttaaatggctgccattaatacgaaagtcaaaaaagccgttatccccgttgcgggattaggaaccaggatgttgccggcgacgaaagccatcccgaaagagatgctgccacttgtcgataagccattaattcaatacgtcgtgaatgaatgtattgcggctggcattactgaaattgtgctggttacacacagttctaaaaactctattgaaaaccactttgataccagttttgaactggaagcaatgctggaaaaacgtgtaaaacgtcaactgcttgatgaagtgcagtctatttgtccaccgcacgtgactattatgcaagttcgtcagggtctggcgaaaggcctgggacacgcggtattgtgtgctcacccggtagtgggtgatgaaccggtagctgttattttgcctgatgttattctggatgaatatgaatccgatttgagtcaggataacctggcagagatgatccgccgctttgatgaaacgggtcatagccagatcatggttgaaccggttgctgatgtgaccgcatatggcgttgtggattgcaaaggcgttgaattagcgccgggtgaaagcgtaccgatggttggtgtggtagaaaaaccgaaagcggatgttgcgccgtctaatctcgctattgtgggtcgttacgtacttagcgcggatatttggccgttgctggcaaaaacccctccgggagctggtgatgaaattcagctcaccgacgcaattgatatgctgatcgaaaaagaaacggtggaagcctatcatatgaaagggaagagccatgactgcggtaataaattaggttacatgcaggccttcgttgaatacggtattcgtcataacacccttggcacggaatttaaagcctggcttgaagaagagatgggcattaagaagtaacatccgtatcggtgttatccacgaaacggcgttgagcaatcgacgccgtttttttatagcttattcttattaaattgtcttaaaccggacaataaaaaatcccgccgctggcgggattttaagcaagtgcaatctacaaaagattattgcttgatcaggaaatcgtcgagggatttaccttgctcatccattgcttttttgattacagctggagtacggccttggccagtccaggttttagtttcgccgttttcgtcaacgtagctatattttgccggacgctgagcacgtttagctttggtgccagatttaacggcagcaaggctattcagcagttcgttcgggtcaataccgtcagcgatcagcatttcgcgatattgctgcagtttacgagtgcgctcttcaacttcagcagcagccgcgctttcttcttcgcgacgttcgttaacaacaacttctaatttttccagcatttcttccagcgtttcaagtgtacattctcttgcctgcgcacgaagagtacggatgttgttcagaattttaagtgcttcgctcattgtagtaatctcaaacttatattggggtggtttgttgaggtaataatagagccttaaattcagttgtgcaatagccaggaatgtaaggaattcaaaattgttctttattttgtgccgccaataaatatcttttcataaaattagccagaaaagacgcggcatatagccctatttacaccgatgatttcgcagcacgtgaggttaaaacttcctgattcatgtcacattttatggggagattatcgtaggctgacgacctttcagtcttctgtattagttgtgtttacgagaattccctattaagcgaatgatgaaaagtagaacagtcgcaataagagcatggacttagtattgcactatctcctggaggtcaacagagggctattacttgcgcaacaggttaaagattgtgaatagttaccagcagtcatttacccgcttataacaagcgaggcagttgtaatgatagctcagaaggattatgcaaggcttcgtaagggagaacgcatatacccacttctgtgcatactgttgagctgaaaaactgacgaattatgataaactccagccaactttatttcatatcattgagggcctgtggctgatggcacagctatatttctactattccgcaatgaatgcgggtaagtctacagcattgttgcaatctagttacaattaccaggaacgcggcatgcgcactgtcgtatatacggcagaaattgatgatcgctttggtgccgggaaagtcagtagccgtataggtttgagtagccctgcaaaattatttaaccaaaatagtagtttatttgatgagattcgtgcggaacatgaacagcaggcaattcattgcgtactggttgatgaatgccagtttttaaccagacaacaagtatatgaattaagcgaggttgtcgatcaactcgatatacccgtactttgttatggtttacgtaccgattttcgaggtgaattatttattggcagccaatacttactggcatggtccgacaaactggttgaattaaaaaccatctgtttttgtggccgtaaagcaagcatggtgctgcgtcttgatcaagcaggcagaccttataacgaaggtgagcaggtggtaattggtggtaatgaacgatacgtttctgtatgccgtaaacactataaagaggcgttacaagtcgacagtttaacggctattcaggaaaggcatcgccacgattaataagaatttctttactgacagggtgagcagggcacttttatcctgtcagttcgttttacgcacttcttccgggctatatacccttctcggcagttttttaacgccgctatacgcctcacagggctcttaagcaccgacgttgacttgtgacctgtaaagtacaatatccctgtgtttaggcgttatacatcgtcgcaaatatgatgaaggctaatgctgtcggtttatggaaaagttgctttgggtaaacaaaaaatacggccccagaagggcaatgccgttcacttaagaggagcggcactatgtttcacaggataacgggtttttgatatcttaaccgacctcggccttgatggtcgggggcgttttgttatgaacaccacttccagagcaccccgaagatgctccagtcgtttcgggatggtccctggtgacgccgtgtttcccagctctatcatttctgatgcgatattcttccacgcaggcagtagccagtggcggttacaacccttctggttcagcgtcagcagcaggtcttcgctgtaaaaaagtttatcaaacaacgtaatagagttatccgggatggtggcgagcatggagtgggccagcacagtttcgctctgccggtaaggtgcggtcacggcattcagcagaatgtgacttcccaggttcattaaggccaccagacgcataaccgggtaggcgttctgccgcttagtggatgtgttggcagacccataatattcacgcagctcgggtttatcaggtgtcctgaactgtgcgccatcaatggcaaaaagttgcaggccgtgccagtcatccttcaggtaacgttccgcgcccctgtctgtgcggtctggcggaagagccattccactggggcggcccccacgcgctgacgcgcctgggtgacagcgctgcgggccagcaggttcatccccgcttcgccatccgcgctcaggttcagacggcgaacaacatcggtaattggctcattgcaccaccatccagataaccatgtcccccggtaaacgacggcggcgaacggtcgcatgagcagaaagcgtcaggcagtgttgtatccactcggtgggaaggtgttctgcaaatagttgtgcagagggcggaggcataagcggatggtcactgaaatcgagcagatcattgagaagtggcataagaaaacggctccctgttgtggaagccgttatagtgcctcagtttaaggatcggtcaactaatccttaactgatcggcattgcccagaaggggccgtttatgttgccagacagcgctactgattaagcggattttttcgcttttttctcagctttagccggagcagcttctttcttcgctgcagtttcaccttctacataatcacgaccgtagtaggtatccagcagaatctgtttcagctcggagatcagcgggtaacgcgggttagcgccggtgcactggtcatcgaatgcatcttcagacagtttatccacgttcgccaggaagtctgcttcctgaacgccagcttcacggatagatttcggaatacccagttcagctttcagcgtttccagccatgccagcagtttctcgatcttagcagcagtacggtcgcccggtgcgctcagacccaagtggtcggcaatttcagcataacgacggcgagcctgcggacggtcatactggctgaatgcagtctgcttggtcgggttgtcgttcgcattgtagcgaataacgttacaaatcagcagggcgtttgccagaccgtgcggaatatggaactgggaacccagtttgtgcgccatactgtgacatacacccaggaaggcgttcgcaaacgcgatacccgcgatagtcgctgcactgtgaacacgttcacgcgctaccggatttttagacccttcgtggtaggacgctggcagatattctttcagcagtttcagtgcctgcagagcctgaccatcagagaactcagatgccagtacagaaacataagcttccatggcgtgagttactgcgtccagaccaccgaaagcacacagggacttcggcatgtccataaccaggttggcgtcgacaatcgccatatccggagtcagcgcatagtctgccagcggatatttctgaccagtagcgtcgtcagttacaaccgcaaacggagtgacttcagaacctgtaccagaagtggtggtgacagcgatcattttcgctttcacgcccattttcgggaacttgtagatacgtttacggatatccataaagcgcagcgccagctcttcgaagtgagtttccggatgttcgtacataacccacatgatcttcgcggcgtccatcggggaaccaccacccagcgcgataatcacgtctggtttgaaggagtttgccagttctgcacctttacgaacgatgctcagggtcgggtccgcttctacttcgaagaagacttcagtttcaacgcctgctgctttcagtacggaagtgatctgatcagcataaccattgttgaacaggaagcggtcagtcacgatgagcgcacgtttgtggccatcagtaatcacttcatccagcgcgattggcagggagccacggcggaagtagatagatttcggaagtttgtgccacaacatgttttcagctcgcttagcaacggttttcttgttgatcaggtgtttcggaccaacgttttcagagatggagttaccaccccaagaaccacaacccagagtcagggaaggtgcgagtttgaagttatacaggtcaccgataccaccctgagacgctggggtgttaatcaggatacgcgccgttttcattttctgaccgaagtaagaaacgcgagccggttggttatcctggtcagtgtacaggcaagaggtatgaccgataccgcccatagcaaccagtttctctgctttttctaccgcgtcttcgaaatctttagcgcggtacattgccagagtcggggacagtttttcatgtgcgaacggttcgctttcatcaacaacggtcacttcaccgatcagaatcttggtgttttctggtacagagaagcctgccagttcagcaattttataggctggctgaccaacgatagccgcgttcagcgcaccgtttttcaggataacatcctgaacagctttcagctctttaccctgcaacagatagccgccgtgggttgcaaaacgttcacgtacagcgtcataaacagagtcaacaacaacaacagactgttcagaagcacagattacgccgttgtcgaaggttttggacatcagtacagatgcaactgcacgtttgatatcagcagtttcatcgataacaactggagtgttgcccgcgcctacaccgatagctggtttaccggagctgtatgcggctttaaccatgcccggaccaccagtcgcgaggatcaggttgatgtctgggtggtgcatcagtgcgttagacagttcaacagaaggttgatcgatccagccgatcagatctttcggagcaccggcagcgatagcagcctgcagaacgatatcagccgctttgttggtggcatcttttgcacgcgggtgcggggagaagataatggcgttacgggtcttcagactgatcaggcttttgaagatagcagtactagtcgggttagtggtcggaacgataccgcaaataataccgattggttcagcgatagtgatggtaccaaaagtgtcgtcttcagacagaacaccacaggttttttcatctttataggcgttgtagatatattcagaagcaaagtggtttttgatcactttatcttcgacgatacccatgccggattcggcaacggccattttcgcgagtgggattcgagcatctgcagcagccagagcggcggcgcggaagattttgtctacttgctcttgagtgaaactggcatattcacgctgggctttttttacacgctctacgagtgcgttaagttcagcgacattagtaacagccataatgctctcctgataatgttaaacttttttagtaaatcatctgctcgaatacgagagtatagtcagtgcggtgatgatttgcttaacctatgaaaatcaaaagcttactcgcgctcacactcactgtgatttactaaaagagtttaaacattagagttattatctctaatgcgtcacttccaggtggcgtaagcaagattactcacttctgggtactgattacgtgatccaaatcaaatttttgcaaagctgacacctttcagcatcgcttttcgccattatagctaacagttaataaattgtagtatgatttggtggctacattagcatgttttgcacaactagataacaataacgaatgatagcaattttaagtagttaggaggtgaaaaatgctgtcaaaaggcgtattgtcagcgcgtcttttcaaccttatttatggctaacattatccggcttttgcttcggagctaaccgtgattcagaccttttttgattttcccgtttacttcaaatttttcatcgggttatttgcgctggtcaacccggtagggattattcccgtctttatcagcatgaccagttatcagacagcggcagcgcgaaacaaaactaaccttacagccaacctgtctgtggccattatcttgtggatcagcctttttctcggcgacacgattctacaactttttggtataagtattgatagcttccgtatcgccgggggtatcctggtggtgacaatagcgatgagcatgatcagcggcaagcttggcgaggataaacagaacaagcaagaaaaaagtgaaaccgcggtacgtgaaagcattggtgtggtgccactggcgttgccgttgatggcggggccaggggcgatcagttctaccatcgtctggggtacgcgttatcacagcattagctatctgtttggtttctttgtggctattgcattgttcgctttatgttgttggggattgttccgcatggcaccgtggctggtacgggttttacgccagaccggcatcaacgtgattacgcgtattatggggctattgctgatggcattggggattgaatttatcgttactggtattaaggggattttccccggcctgcttaattaattcctttcaaatgaaacggagctgccatgctccgtttacttcgtcattatttttactttgttcccgcgcagttatcaaaagcaaaaggaataggtaaaaatattcttctcaaattacagttagttataaggatttccttaactgcttctcctcaccatcatgttattttcgccacatcataatcctgggcttgctgaagaataattgaaatgatattattaattccactgcctttggtagaggaaagtgctaaataataatcaattgttaaattattgtgcatttcactactggaactgtaatcagaaaagatagacatgcttagccaatctctatttgattgaattgaaagatgtttgttaaggcatggatgcaagctatagattctgatacggtcaataaaagagaattgcttaacaattttgcaaaatgtattggcgagtaagaaccgcatttggtactttccgggcaaccgccagacgattctttattggtaatgagaataattaacaattaaagagcgtcgcgaaagaataatgtgtctcgacaggggagacacagtacgaatcgacataaggtgatcgtctgaatcaccagaataaataaagtcggtgatagtaatacgtaacgataaagtaacctgacagcagaaagtctccgagcctgtgcagggtcccaatccgggattacacatgctggttaataccagtaattataatgagggagtccaaaaaacaatgaccaacatcaccaagagaagtttagtagcagctggcgttctggctgcgctaatggcagggaatgtcgcgctggcagctgatgtacccgcaggcgtcacactggcggaaaaacaaacactggtacgtaacaatggtagtgaagttcagagtttagatccgcacaaaattgaaggtgttccggagtctaatatcagccgagacctgtttgaaggcttactggtcagcgatcttgacggtcatccagcacctggcgtcgctgaatcctgggataataaagacgcgaaagtctggaccttccatttgcgtaaagatgcgaaatggtctgatggcacgccagtcacagcacaagactttgtgtatagctggcaacgttctgttgatccgaacactgcttctccgtatgccagttatctgcaatatgggcatatcgccggtattgatgaaattcttgaagggaaaaaaccgattaccgatctcggcgtgaaagctattgatgatcacacattagaagtcaccttaagtgaacccgttccgtacttctataaattacttgttcacccaagtactagtccggtgccaaaagccgctatcgagaaattcggcgaaaaatggacccagcctggtaatatcgtcaccaacggtgcctataccttaaaagattgggtcgtaaacgaacgaatcgttcttgaacgcagcccgacctactggaacaacgcgaaaaccgttattaaccaggtaacctatttgcctattgcttctgaagttaccgatgtcaaccgctaccgtagtggtgaaatcgacatgacgaataacagcatgccgatcgaattgttccagaagctgaaaaaagagatcccggacgaagttcacgttgatccatacctgtgcacttactattacgaaattaacaaccagaaaccgccattcaacgatgtgcgtgtgcgtaccgcactgaaactaggtatggaccgcgatatcattgttaataaagtgaaagcgcagggcaacatgcccgcctatggttacactccaccgtatactgatggcgcaaaattgactcagccagaatggtttggctggagccaggaaaaacgtaacgaagaagcgaaaaaactgctggctgaagcgggttataccgcagacaaaccgttgaccatcaacctgttgtataacacctccgatctgcataaaaagctggcgattgctgcctctagtttgtggaagaaaaacattggtgtaaacgtcaaactggttaaccaggagtggaaaacgttcctcgacacccgtcaccagggtacttttgatgtggcccgtgcaggctggtgtgctgactacaacgaaccaacttccttcctgaacaccatgcttagcaacagcagcatgaataccgcgcattataagagcccggcctttgacagcattatggcggaaacgctgaaagtgactgacgaggcgcagcgcacagctctgtacactaaagcagaacaacagctggataaggatagcgccattgttcctgtttattactacgtgaatgcgcgtctggtgaaaccgtgggttggtggctataccggcaaagatccgctggataatacctatacccggaatatgtacattgtgaagcactaatggcaatacgtggggcaggagtgtcctgctccacggtgtctgatttttatcgcattacagaaggcacaggccagaaggtagggcaatgttaaaatttattctacgtcgctgtctggaagcgattccgacgctatttattcttattactattagcttctttatgatgcgcctcgcgccgggaagcccttttaccggcgaacgtactttaccgccagaagtgatggccaatatcgaagcgaaatatcatcttaatgatccgatcatgacacagtatttcagctacctgaaacaactggcgcacggtgatttcggtccaagctttaaatataaagattatagcgtcaatgacttggttgcatccagttttcccgtttctgccaaactgggagccgcagcatttttccttgcggtaatactgggtgttagtgctggcgttattgccgcattaaaacaaaacaccaaatgggactataccgtgatggggctggcaatgaccggggttgttatccccagttttgtggttgcaccattattagtcatgatatttgcgatcattttgcattggctgccgggcggtggctggaatggtggggcgcttaaattcatgatattgccgatggtggcgttgagtctcgcttatatcgccagtattgcgcgtattacccgtggctctatgattgaagtattacactccaattttattcgtactgcccgggcgaaagggttacctatgcggcggatcattttacgtcacgcattaaaacctgctctgttacccgtgctctcttatatgggccccgcatttgtcggcattattaccggttctatggttatcgaaaccatttatggtttgccggggattggacaactgttcgttaatggcgcattgaaccgtgactattccttagtgttaagcctgaccatcctggttggtgctttaaccattttgtttaatgccattgtcgatgtgctatatgcggttatcgacccgaaaatccgttactgatactggagctcgcgatgatgttaagtaagaaaaacagcgagacgctggaaaatttcagtgaaaagctggaggtcgaagggcgcagcttgtggcaggacgcacgtcgacgttttatgcataaccgtgcggcggttgccagtctgatagtgctggtgctgatcgcgttatttgtaatcctggcaccgatgctttcccagtttgcctatgacgatactgactgggcgatgatgtccagcgccccggatatggagtccggtcactactttggtactgacagttccggtcgcgacctgcttgtgcgcgttgcgattggcgggcgtatcagtctcatggtcggtgttgctgcggcactggtggctgtggtcgtcgggacactttatggtagcctttccggttatctgggcggtaaagtggatagcgtaatgatgcgtctgctggaaatcctcaactccttcccattcatgttcttcgtcattttgctggtgacctttttcggtcaaaacatcctgctgattttcgtggcgataggcatggtttcctggctggatatggctcgtattgtgcgtgggcaaaccctgagtctgaagcgcaaagagtttattgaggcggcacaagttggcggtgtaagcacaagcggcattgttattcgccacattgtgccgaatgtactcggtgtggtggtggtctacgcaagtcttctggtgcccagcatgatcctctttgaatctttccttagcttcctggggttgggtacgcaagagccgttaagcagctggggtgcattgctgagtgatggcgcgaacagcatggaagtctctccatggttattgttgttcccagcgggattcctcgtggtgacgctgttttgtttcaactttatcggcgatggcttgcgtgatgccctcgacccgaaagatcgttaaggagtgcagccatgagcgtaattgaaactgcaactgtgccgctcgcacaacaacaggctgacgcactgctgaacgtgaaagatttgcgtgtcacctttagtaccccggacggcgacgtcacggcggtcaatgatttgaatttttccctacgtgccggagaaacgctgggtattgtaggtgagtctggtagcggtaaaagccaaactgcatttgcgttgatgggcctgttggctgccaacggacgtattggcggaagcgcaaccttcaatgggcgtgaaatcctcaatttgccagagcatgaactcaataaactgcgcgctgaacaaatcagtatgatttttcaggacccaatgactagcttgaatccctatatgcgcgtcggtgagcagttgatggaagtgctgatgctgcataagaacatgagcaaagctgaggcgtttgaagagagcgtgcggatgctcgatgcggtaaaaatgccggaagcgcgtaaacgcatgaaaatgtacccgcacgaattttctggcggcatgcgtcagcgagtcatgattgcgatggccttgttatgtcgacctaagctgctgattgcggatgaaccaacaactgcgctggacgtcaccgtacaggcgcagatcatgacgctattaaatgaactgaagcgggaatttaataccgccatcattatgatcacccacgatcttgtcgtggtggcggggatctgcgacaaagtgctggtaatgtacgccgggcgcacgatggaatatggcaacgcgcgcgatgtcttttatcaacccgttcatccttattctatcggtttgctcaacgcggtgccgcgtctcgatgcggaaggtgaaacaatgttgaccatcccgggtaatccgccaaacctgctgcgattaccgaaaggttgcccgttccagccacgttgtccgcatgcgatggaaatttgtagtagcgcaccgccgctggaagagtttacgcctggccgtctgcgtgcttgctttaaaccggtggaggaactgttatgaatgctgtaactgaaggaagaaaagtcctccttgaaatcgccgatcttaaagtgcactttgaaatcaaagatggcaaacagtggttctggcaaccgccgaaaacgctcaaagccgtcgatggtgtcactcttcgcctgtatgaaggggaaacattaggtgtggtaggggaaagcggatgcggtaagtccacctttgctcgcgccatcatcggtttggtcaaggcgaccgacggtcatgttgcctggttaggtaaagagttgctgggcatgaaacccgatgaatggcgtgccgttcgcagtgatattcagatgattttccaggatccgttggcaagcctaaacccgcgtatgaccatcggcgagatcatcgctgaaccactgcgtacttatcatccgaaaatgagtcgccaggaagttcgcgagcgcgtgaaggcgatgatgctgaaagtcgggttattgcctaacctgattaaccgctatccgcatgagttctctggtgggcagtgccagcgtatcgggattgcgcgtgctcttattcttgaaccgaagctgattatctgtgatgagccggtgagcgcgctggacgtgagtattcaggcacaggtggtcaacctgctccagcaattgcaacgtgagatgggattgagtttaatttttatcgctcatgacctggccgtggtaaaacacatttccgatcgtgtgttggtgatgtatctcggccatgcggtagaactggggacctatgatgaggtctaccacaatccactacatccttacaccagggcattgatgagcgcagtccccatacctgatccggatctggagaagaacaaaaccatccagttactggaaggggaattaccgagcccgatcaacccgccttccggttgtgttttccgtacccgttgcccgattgccggtccagagtgcgccaaaacacgtcctgttctggaggggagtttcagacactccgtttcttgcctgaaagtcgatccgctttaaaaacaataagggctgacagttgtcagccctttttcacgctaaaagcgattatttattcccgccagatgatatggcaaagtttgtgatctttttcgcggcataacagaatgcgggcaaaaacatcgttgatttcaccatcttcactgtccgccagaccaatcaccacttcggcaaaaaagtccgggttcaaatcgaaatcaacatgttcctgccagtcttccgccggatcgaataactccgcgccgccgcgctcttcaaactgaagattgaacagcagaacatcagctggatcgagattgtcggcagccagttcgagaaaaatatcgtaggcctgttcaagcgtttcatcttcagtcaggcgattgtttagatccatatccatagttactacctgtttaacctctgttggcgacgttttacagcaacggactgaagaagtaaaacagtcgctcggcgacacgttgccataatggacgttttagccataaacgggcatcgagcagacgactacggctaatataatcgtcctgaacggcggcgaggtcagcaccaaaacctttatcgtcgattgccagggtaatctcgaaatttagccacagactacgcatatcaaggttaactgtgccaaccagacttagttcgccatcgaccagcacgctcttggtatgcagtaacccgccttcaaactgataaattttaaccccagcagccagcagttccgtaaagaatgcgcgactggcccagccgaccagcatgctgtcattttttcgcggaaggataatactgacatccaccccgcgctgcgccgccgtgcaaatcgcatgaagtaaatcatcgcttggcacaaagtagggcgtggtcatgatcaaatattcacgcgcgctataagccgcagtcaataatgcctggtgaatgagatcttccggaaagccggggccagaagcaattgtgtgaatggtgtgaccgctggcctgttcaaacggcataatattgacatctggtggtggcggcagaatacgttttccggtttcaatctcccagtcgcaggaataaataatccccatcgcggtggcgatagggccttccatacgcgccatcagatcaatccattgccctacgcccgcatcttgtttgaagtagcgaggatcgaccatattcatgctgccggtgtacgcgatgtaattatcgatcatgatcatcttgcgatgttggcgcaggtccatacggcgtaaaaacacacgcatcagattgacctttaaggcttcgaccacttcaataccggcattacgcattagctcgggccacgggctgcggaaaaaagccacactcccggcggagtcgagcatcaatcggcaatgaatgccgcgtcgcgcagccgccattaaactttcagccacctggtccgccatgccgccgggctgccagatataaaacaccatctcaatattatggcgcgcgagctggatgtcgcggattaacgcctgcatcacatcatcactctcggtcatcagttgtagctgattccctttgaccccagcgatcccctgacgacgctcgcaaagcttgaataatggcgcagcgacactgctattttcttcggcgaagatatgcttacaggctttaaggtcgttaagccattttgcggtggaaggccacatcgctctggcgcgctcagcgcggcgtttgcctaaatggagctcgccaacggcaagataggcaataattccgactaacggcagaatgtaaataatcaacagccaggccatcgcggagggaactgcgcgtcgtttcattagaatgcgtaaagttacgcctgcaatgagcaaccagtatcccagaatggccaaccaactcaccaacgtataaacggttgtcatagattagaaatccttttgaaagcgcattgttatgagtttacgcatatggattcatctggcaaataaaaacgcgggaaaagcactggtcagcgtcgggggtgggggtataatgaccattctgttattgcatagagtagttaacatgaagcggagtagaacggaagtggggcgctggcgcatgcagcgtcaggctagccgacgtaaatcgcgttggcttgaggggcaatcgcgccgaaatatgcgtatccacagcatcaggaagtgcattctaaacaaacagcgtaactcgttattgtttgcgatctacaatatctaaatgtactgggcaccattgcggtgcccaataagtttactcttccgtctttaaactttatttttgcgcgctttctttactgtcagctttcgtttctagttcatcgttatcgctgaaaataccatgaccactgttcaacaacatactaacgagcatatcattattaatctcttcaccatttaaaactcgcgccagaatttcgctgccaaacagttgcggactgagaatgatatccggatgtaccatcttaatcttattcaggtttttgctatcactgacggcgagaactgttttgacatcactgctcatatcttttgcgctgagtacaacaaacgcgttatctgcatcgttatcactcagcgccagaatggcccggcaacgatcgattcccgctttctttaatacagaactgtcattactgtcaccggggataacatcagcattatcgcctaagcgttgctcaagttgcttgatatcatcttcaggcaagttgctgataaccgttacgttttgtccgcgttgattcagttgcaggatcgtattgatggcgagaatgctatgtccgcaaacaataaaatgatctttacgatgcattgtatgattgtttccttttacaagtttgttgaatcccccgcggataagcggaccaaaaatactggtcatagatgtggcaaaaacggtaatgccggaaataatgacgctaatagtgaacaatcgtgcactttcagaaacagggacaatatcgccatagccgacggtactcatggtttctatgctaaaatagaacgcggtcatcaaactttctattcgcggattaaaaccttcgcttaaataaagcgcaccgtaggtactgtaaaacagtaatgtcgtgaaactaataaatgcaaaaattgtcccggctgcggcgctactgtgggagaagtctttgcgcagtatcagcaaaaacaccagcgtaaaaatgcaaaatccaatactaaatttcagccagggataaaaatgcagggtgtaaattagcgctatcaacaacaaaatgatactgattgcccatgcgagctttgcccggaacagtaagccaatggagttcaggacaagaaagacgccgagcataaagagtggggcgtttgccagcaaggagagatccaactcactaaatgctttgatatggaaaatatcaagcaaattgacgctcataccatagattgttttaaaaataagcaatccatttaaaaagacggccagcgcgagaatgtcgtgccgaagggtcacccataaatttgttgctgtttgtttgaatgtagcccagtgactcactgatacctctgtaaccacaattttgtttaattatcttagcgtgcacattttctgaacatacatgcagcgcgtgaatgtgttaaacaatagtagatgactttatccgcagtaatcaaaggatttgagcgagcaactgtacctcaggaaaggtcatttttcctgaatatgctcacatcatataaagaaatacagataaagttattatctgcttgtggtggtgaatgcactgaccggctataaggaaaggccaaacaagaacacggttgcaaaaaccgtgcccttaaatattgaatctctattcagaacactttcttaaatggtttcacactaacgtgttcatagactcctgccgctacgtacgggtcagcatcggcccaggcctgagctgcttccaggctttcaaattcagcaataacggtactgccagtaaatcccgcagcccctggatcgttactgtctaccgctggcattggaccagctgtcaacaaacgaccttcatcatgcagtaactgtaaacgtgctaaatgtgccggacgaacggaaaggcgtttttcgaggctatcagctttgtcttgagcgtaaataacatacaacacgggcacaactccttgttcgggaaagttgtaaagtacgttatttgaaagggcgaagatctgcaacggaaagatgatgtctttgttaaggccatgcataaagtaagggtaattacgccaaaaatgacattttcactgatcctgatcgtcttgccttattgaatatgattgctatttgcatttaaaatcgagacctggtttttctactgaaatgattatgacttcaatgacccttgatttacctcgccgcttcccctggccgacgttacttagcgtctgcattcatggtgctgttgtggcgggtctgctctataccagcgtacatcaggttattgaactacctgcgcctgcgcagccgatttctgtcacgatggttacgcctgctgatctcgaaccgccacaagccgttcagccgccaccggagccggtggtagagccagaaccggaacctgagccgatccccgaaccgccaaaagaagcaccggtggtcattgaaaagccgaagccgaaacctaagccaaaaccgaagccggtgaaaaaggtacaggagcagccaaaacgcgatgtcaaacccgtagagagccgtccggcaagtccgtttgaaaatacggcaccggcacgcctgacaagtagtacagcaacggctgcaaccagcaagccggttaccagtgtggctagtggaccacgcgcattaagccgtaatcagccgcagtatccggcacgagcacaggcattgcgcattgaagggcaggttaaagttaaatttgacgttacgccggatggtcgcgtggataacgtacaaatcctcagtgccaagcctgcgaacatgtttgagcgtgaggtgaaaaatgcgatgcgcagatggcgttatgagccgggtaagccaggcagtgggattgtggtgaatatcctgtttaaaattaacggcaccaccgaaattcagtaagcagaaagtcaaaagcctccgaccggaggcttttgactattactcaacaggtaaggcgcgaggttttccttcaggatcaaccgcgacatacttaaataatgcttctgtcgctttatagcgttgcccaattggttcagacgctacttttttcacccacacttcaatattaatgctgacgcttgtcgtccctttctggacacagcgtgcatagcagcacaccacatcgccgaccgcaaccggccgtaagaaagtcattccttcaacccgcacagtcactacgcgaccgtgggcaatttcttttgccagaatagcgccgccaatatccatttgactcattaaccaaccaccaaagatgtcaccattggcattggtatcggcgggcatggctaaagtacgtaaaacaagatcgccctgagggacgttatgtgttgtagacatggtaaaaccgacttaaaaggaaaatcacaggcgcgatgctactatgattttcctgaggagaacagaggagatacagcgccagccccgaaggactggcagtctggttaggatttatcttcctgcggcatgtggcggtagatatagataccgcttaacaatgtgaagattaaggtaagggcggtcaggccaaagactttaaagttgacccaaatattttgcggcagccagaatgcgatgtagatgtttgccagaccgcaaaggataaagaaaacagcccaggccagattcagcttgctccataccggttgcggcagcgtgagttctttacccagcatccgctgaattagcggctttttcatcacccattggctgactaacagggctcccgcaaatagagcataaatgacagtaaccttccatttaataaactcatcattgtggaagaacagcgtcaagccaccgaagacgaccaccagaacaaaagtgatcagggccatcttctcaaccttacgaaagcgaacccagctatagataagcacaatcgccgtggcgacgatcagcgccgcagtagccgcatagatgtcataaatcttgtaaaacgcgaaaaagacaaccagcggtaaaaaatcaagaaactgcttcattttacgattccgtaatcaaatgcttaaggttattggcgaatcaacatatacaggcggaacagatagatgagcaatatggcactaatcaggttgctcaaggtgttcgccagtacggcaccaatttccggggttaatgcggcaaaagaagaggcaaaaagcagcaacagtgtttttgccagcaaccagctcagtactgcgggtgccaccagacgcatattcgcccaagtcagccgcatactgctacgcatgctggcaaaaacgcccattttgtcctgtaccaacatcaccggtgccagggccagtaaaatggccatgataattcccggaacgaccaccagcatgatgccaatctgtactaaaagggtagtcagaaaaatcagaataaataactttggcaatatcggcgcactggcaccaatagctcgcagcgcactgactctctgacccgcagacaccagctggataattaatattacgcctccggcgagaatggcgttaccgattaatccactaaaagtggacgccgcactagcctgcagcaaaatttgttgctgttccggactcatattctgaaccaggtcgaacaacccactactgccgctaacgggcacgccgtcattgagctgcgcaagctgtgcatcactgggactgaaaacatgccctaacaccactgtgataaacgcacatagcaagcttaccaacagaatggtcataaattgattacggaagaaatttccggtgtcacggtatacggactgcgccgtgatagacatgcactctccttgagttttatgcaggtgttaattagcgggcaattgtaccctggttaagcctcgggtggcagcatcaggtcttgtatggaaaagcatatctttgtaaagcggaggtaattgctggccttcaggcatgggcaaatcgcggcaagtggcgaccgagttaatatttgcgtagcgaaaatatttaaaaattgatttaaatcacattaaccaggattctcaatgcaacttctaaattaatccagatcaataaagggtgaattatcatatgtaatgtgatctatgtaggatcatttgttactccaatgtaggtatattcgtcacgtttttataaccataacgacggagcggatatgaaaaagttaacagtggcggctttggcagtaacaactcttctctctggcagtgcctttgcgcatgaagcaggcgaattttttatgcgtgcaggttctgcaaccgtacgtccaacagaaggtgctggtggtacgttaggaagtctgggtggattcagcgtgaccaataacacgcaactgggccttacgtttacttatatggcgaccgacaacattggtgtggaattactggcagcgacgccgttccgccataaaatcggcacccgggcgaccggcgatattgcaaccgttcatcatctgccaccaacactgatggcgcagtggtattttggtgatgccagcagcaaattccgtccttacgttggggcaggtattaactacaccaccttctttgataatggatttaacgatcatggcaaagaggcagggctttccgatctcagtctgaaagattcctggggagctgccgggcaggtgggggttgattatctgattaaccgtgactggttggttaacatgagtgtgtggtacatggatatcgataccaccgccaattataagctgggcggtgcacagcaacacgatagcgtacgcctcgatccgtgggtgtttatgttcagtgcaggatatcgtttttaattccgcacaaaaacgaccccgtaatatacggggtcaataaggacatggtataaagggtattatttcttcgcttctacgccatcagtttcagagcgaattaaaaatttctcagttgtttgcggaatattctgaatcagccagtcggccatttgcttttcctcatttaaaatcgcttcgatggttggaatactagctgtatcaccggcattttttgctgctgctaatagactggtgtaacaggcgatttcaaattgctcgaagacatatccgctaatagagcctttgactatttcatcagaagggaatataccaccgatactctgcccaagcgcagccattttactcatggaatctttaatgacactacgactaatgtcattacgatcaagaatagtttccagttgaacaatctggtttttggtttcactaagatgttgttcaatacgagcgcgtagttcaggataattatctatacggctggccatggattcaagcatagattcggcttgcttttccattgcgtgggcgtcacgtaaccagtcatgataatgttcaatacgattcatgaaaatgtcctctttataaaatgactaaaagttaaaattcatatttcaggctttattttcggctttcttatttacgttattaatggccagatcagtcagtttgatgtcggtggccttttcttcttccagggtttctttcagaagcttcgctgctttacggtaacctaattgttcagccagcgtcgctaatgtcccgtaactggcaatctcataatgctcgactttctgtgctgcggcaatcagtgcggcatcacgcacttcgtttttctcggtactttcgatgacctcattagcttcttcaataagaccttccattgccacacatttcatgcgcttaattttcaggttgctttcggactccacaacttgatcaatacgttcaatctgtccatgagtttcctcgaggtgcgcatgaaaagcctgacttaatttttcattacttgttgctcttgcgagttttgccagtgcccgggttaattgtttttctgcgctgtaggtatcactaagcaggtgaataaatacatcttcaatggtcttcatattcatatttttctccagtgaaatcactgcgagccatacggcccgcagatgcaattatctttatcagctgatattaataattaacggtgaatcaggatttgccacttttattaccaccgctttgttgaccgccttttttacccgcttcagatgcgcgttgcggatcatttttaaaattaccgccgctatgctgaccgcctttacggcctgcgtcggatgccttctcacggtcttcggcgaaatttccactaccaccacgatgttcggccatgttatttctcccgttgcgttgcattgtttcattaatatgagtgttgtgtgtcgacactcattaaaattagtcgctaatgagaattagtcaaattaagcgcaacgagaagatagagggaaaatatattttgaggaacattctggatatattaacaattacctgaggaataagtgacttagagaaaattattgattttactggtgttatgttgcgggattaatttgtttgattatattactgttgggcggaaaaatgacgtaagttgacgttcgaccggggtaagcgaaacggtaaaaagataaatattaaatgaatttaggatttttccggcttcattaaagaaagttaaaatgccgccagcggaactggcggctgtgggattaactgcgcgtcgccgctttcatcggttgtacaaaaactttcagtgccgccagcattttctctggctcattaatatgttgctcgatgattttaacaatggcgctaccagaaatcgcgcccgcagctcctgcatcaatcgctgcttttacctgatccggggcggaaataccaaatccctgcaatggaggtgcagcgttgtactctttcagcttcgcaaccagatgattgaggggtaacgcggcgcggttttctgcgccggtcacgcctgctcgactcagcaaataggtgtaaccacgaccgtaagaggctatctggcgcagcaggtcgtcatcggcatttggcgggcagatgaagataggtgcgacattatgacgcaacgcggcctggcggaagggcgcggactcttcaactggcacatcggcaaccagcacgctatcgacgccgactttttcgcactgggcataaaactcatcaatgcctttgttaaacaccagattggcatacatcaacaggccaatgggaatggtcgggtgtttctggcgaatcagtgccagcatttcaaaacattgtgccggagtcacacctgccgcaaaggcgcgcagagtggcgttttgaatcgtcgggccatccgccagtgggtcggagaaggggatacctaactccagcgcgtcagcaccggcttcaattagcgtatcgataattttcaaactctgctcaatgcccggatcaccgagcgtgacgaaaggaacgaatgcgccttctttgcgctccttcaactgggcaaacagagattcgtagcgttccatcagatttcccctcgtgctttcaaaatatcgtgaacggtgaagatgtctttatcgccgcgaccggaaaggttaaccaccagtagctgctctttatccgggttttcgcgcatcattttcaacgcatgggccagggcgtgggaggattccagcgccgggatgatcccttcgtgcaggcacagcgttttgaaggcttcaagggcttcatcatcggtaatagacacgtaatcagcgcgtccagtgctgttaagatacgcgtgttgtgggccgacagacgggaaatccagtccggcggagatggagtaagattcttcaatctgcccgtcttcggtttgcatcatcggcgctttcataccgaaatagatacccacgcgaccatgttttagcggtgcgccgtgctcgccagtttcgataccgtgaccacctggctccacaccaatcaggccgacgttggtttcattgatgaaatcagcaaacatgccgatggcattgctaccgccgccaacacaggcgataacggcatccggcaggcgaccttctctttccagaatctgcgctttggtttcttcgccaatcatccgctgaaactcacgcacaatggtcggataaggatgcgggccagctgcggtgcccagcatatagtgcgcggtttcgtaactaccggaccagtcgcgcagcgcctcgttacaggcatctttcagcgtcgcggaaccgctatgcaccgggatcacttccgcacccattaagcgcatacgaaaaacgttagggctctggcgttcaacgtctttggcacccatataaatacggcatttcaggccgagcagggcgctggcaagggcgctcgccacgccatgctgaccggcaccggtttcggcgatgatttcggttttacccatccgcttcgccagcaacgcctgccccagcacctggttagttttatgcgcgccgccgtgcagcaaatcttcacgcttgagatacagcgtggtgttcgtcccggctgtaatgttctggcatttggtcagcgcggttggacgcccggcatagtttttcagcaggtcgttgaactgagcctgaaattcaggatctttttgcgcactgacaaaagcttcttccagctggcgcagagcaggcatcaggatttgtggcacgtacatgccgccaaactcaccaaaataggggttaagtaatgttgtcattgttcctttccttaatatgcgcgcagcgtctggaaaacgctggccaaaagacgtgcgtctttgatgcccggttggctctctacagcagaattaaaatcaagtccggcgcagccggtttgtgccgcttccacgcagttatctgcgcctaagccccccgccagcagaacgttgccaaggctttgaccatttaatagactccagtcaaaacgttgcccgcttccaccctggccgttgtctaaaacatatttatcaacgtgctgaaactcgcgggcgggcagggtttcaccgacgcttaatgctttccagatggcaacatgtgctggcagagcttcacgcagcgtatcgatatacagctgttcttcattaccatgcagttgcactgccgccaggcttaacaccttagctttgtccaccacatcggcaatatcgtgattgcggaacacgccaacatactgcaacggtgccgcagccatcacttcctgcgcctgttcaacgttgacgcaacgcggacttgtcgcaacaaaaatcaacccaccgtaaatcgcgcccgcgtcataagctgctttagcatcttgcccacgcgtcaggccacatactttattctcacccagcaacacccggcgcacggcggcgtgcaaatcgtcatgggccatcaacgcgctaccaatcagaaaaccgttagcgaagtggcttaactcgcgcacctgagcgtaagtattgatgccggattcgctgattaccgtcacgttgtgccccagtttcggcgcaagctcgcgggtacggttgagatcaatgctcaaatcacgcagatcgcggttgttgatgccaacgacctttgctcccaatgcaatggcgcgctcctgttcctcttcattactgacttcggtcagcacccccatctccagactgtgagcgacggcggcaagctggcgatattggtcgtcatccagtacactaagcattaataagcaggcatcggcctggtaatagcgcgccagatagatctggtaagggtcgataatgaagtctttacataaaatcggctgcggggcgatttggctgacgatggggaggaaattaaagctcccctgaaaatatttctcatcagtcagcacgctaattgcgctagcgtaatgtttataaatggcggcaatgcgtgctggatcgaaatcatcacggatcacgcctttactcgggctcgctttcttgcactccagaataaacgccgtgcgcgcaccctgtagcgcatcataaaaatgtcgcgtgctcggctgaacctcattctgaaaactggccagcggttgctgctgtttgcgggcttctacccaaatcgccttgtctgcgacgattttcgctaaaacggtttgcatcatttaccctcgtgccgccagtgcggtgactctgtcgtaagcggaaccactgcgcagtacctcaagaacggtttgcgcattggcttgcagatcttcatggccatgcaggcgcattaacatggcgacgttcgcagcgacggctgcttcatgggcggcgtcgcctttaccttgtaacaaacgtgttaaaatgtcacggttttcttccggtgttccgcctgccagttgctcctggtggtagggtgtcaggccaaagtcttctgcggtgagctgatagcttttaatttcgccgtcatgcagttcggcaacgattgtcggcgcgtgtaaactaacttcatccatcccgccgctgtgcaccaccgccgcgcgttgataccccagcacgcgcaaggtttcggcaatcggcagcaccagttccggactataaacaccaattaacgccagcggcggatgcgccgggttaatcaatggccccagcacattgaacagggtgcgggttttcagttgctggcgaaccggcatcgcgtggcggaatccggtgtgatacttcggcgcaaagaggaaacatacacctaactcatccagcgcctggcggcttttatcggcgttcatatcaagattaataccgaacgccgccagcagatcggagctaccagatttactggagacgctacggttgccgtgtttcgccactttcagcccacaggccgcggcgacaaacgcactggcggtagaaatattgatactgttgctgccgtcaccgccagtaccgacgatatcagcaaacagataatccgggcgcgggaacggcgctgcgttttccagtagcgcggttgctgccccggcgatctcgttcgggtgctcaccgcgaattttcatgctcaccagcgccgccgccagttgttccggcttcagctcgccacgcaccaccgcactaaacagctggtggctttcttgttggctaagcgtctgcgcctgatacagtttttccagaatcggttgcagcgtgttggctggctctagtttctgctgcgcccaggccagcgtttgttccagcaggcgagcgccctgggtggtgagaatggattccggatggaactggaatccacaaacgcgatccgcatcgtgacgtactgccatcaccatgccattaaaatgggcgttgatggttaaaccggccggaatgttactgccaaccaggctgtgataacgcgccaccggcagcgggtttgttaatccggcaaacatcgcctgaccgtcatgttcaatgctggaggctttaccgtggagaatttcgcccgcctgaccgacatagcccccgtaagcttcgacaatcgcctgatgtccgaggcaaatgccaataatgggcagcttgccacgcaagcgggtgaggagttccggcatacaaccggcttcgctcggcacaccggggccaggagaaagcatcagcaccggattgctcatggtcgccaggcgttcaattaaggtttgcgccggaatatggttgcggtaaatcaccacgttatgcccattgctgcgcaactgatctgccaggttgtacgtaaaagagtcgatattatcgagcagcagaatgtcagccatcagaaagtctcctgtgcatgatgcgcggtggcaatagcgcgcagtacagcgcgggctttgttacgggtttcgtcggcttcgctctgcggaacagaatcaaggactacaccagcacccgcttgcacggtggcgataccgttttccaccagcgcgctgcggatcacaatgcaggtgtcgagatcgccatgcgcggtgaaataacctaccgcgccgccgtagctgccgcggcgacgaccttccgcctcggcaattaactgcatagcgcgtactttcggcgcaccgcttaacgtccccatattcatacaggcgcgataagcgtgcagggcgtcaagatcgtgacgcagttcgccgactacgcgagagacgaggtgcatcacataggaataacggtcaactttggtgagatcggcgacgtagcggctgccgggggtgcaaatgcgtgccagatcattacgggcgagatcaaccagcatcagatgttcagacagctctttatgatcggtacgcatttccagttcaatacggctgtcgagatctctgtccagactaccatcggcgcgacgaccgcgtgggcgtgttccggcaatcgggtagatctcaatctggcggctggtggcatcatacttgaggctgctttccgggctcgcgccaaatagggtgaaatcattatcctgcataaaaaacatgtacgggctgggattactctttttcagcacgtaataggccgccagcggactcgggcagggcagagagaaacggcgagatggcaccacctggaaaatttctccagcgcgaatcgctttttgcaacaaacgcactacgccaccgaactcttcatcgctctgattacattcacaacgcatatgcggcacggaaaccactggcagcggcggcgcggcttcggtcagttgctgacgtagttcgttcaggcgagcagtgagacgttgtttttcttcttcattcggagcaaacaggctggcctgaatacgggtgctttttttctgatggtcaatcaccatcagcgtttcagcgagataaaaacagaaatcagggcagttattttccgcactcagttgcggtaaatcttcaaatcccgccacaaggtcataagagaacaggccgccgaagaacatggcttctcgttcttccttcggtacattcaacagattctgcaataaacggaaagcgtcaaaaacgctaagggagcataagcgggcgtcttcatccagcagtggactgacaggggggaagcgcagcacacggcagtttggactttgttcactttccacacccgcaggcagggcgttatccagtagtgccaggagggcttcgccgttgccggaaagtgcctggattgtgacagtgtcacctaaagctgtaatgcgcagcgcactgtctaccagcagcaggctttttaaatcatctttgctgtcgatatctgcggattccagcagcagcgttgccggacgatccccacacaactggtgaaaaagcgcggtgggattgtcgcgataagcgccttcgcaggttagcagttcgagagtcggtttttgtgtttgcattgttattctctaattttgttcaaaaaaaagcccgctcattaggcgggctgggtatctgattgctttacgcatggtgaatacactgcccgtttcaggaagtgcgccaccaacctttcagtacgaaaattgctttcattgtcgataccctttttacgtgaacttgcgtactagttaactagttcgatgattaattgtcaacagctcatttcagaatatttgccagaaccgttatgatgtcggcgcaaaaaacattatccagaacgggagtgcgccttgagcgacacgaattatgcagtgatttacgacctgcacagccataccacagcttccgatggctgcctgacgccagaagcattggtgcaccgtgcagtcgagatgcgcgtcggcaccctggcgatcaccgaccatgacaccacagctgcaatcgcgccagcaagagaggaaattagtcgtagcggactggcgttgaatcttattcccggcgtggaaatttccacggtctgggaaaatcatgaaattcatattgtcgggctgaatattgatattactcatccgctaatgtgtgagttcctcgcgcagcagacagaacggcgcaatcagcgggcgcagctgattgccgaaagacttgaaaaagcgcaaatacctggggcgctggaaggcgcacaacgactggcgcagggcggcgcagtgacgcgcggtcattttgcgcgtttccttgttgagtgcggcaaagccagtagtatggcggatgtctttaaaaagtatctggcgcgcgggaaaaccggatacgttccgccacagtggtgtacaatagaacaagctattgatgtcattcatcattctggcggtaaggcggtgctagctcatcctgggcggtacaatcttagtgctaaatggctgaaaagattggttgcgcattttgccgaacaccacggtgacgcgatggaagtcgcgcagtgccagcaaagccccaatgaacgtacccagctggcggcccttgcgcgtcagcatcatttatgggcaagtcaaggatctgattttcatcagccatgcccgtggatcgaactgggtcgtaaactctggctgcccgcaggcgttgaaggcgtctggcagctatgggaacagccgcagaacaccacagagagggaattatgagccagtttttttatattcatcctgataacccacagcaacgtctgatcaaccaggcggtggagatcgtgcgtaaaggcggggtgattgtttatccaactgattccggctatgcgctcggctgtaaaattgaagataaaaacgcgatggagcgtatttgtcgtattcgccagctgccggacggtcacaactttaccctgatgtgtcgcgatctttctgaactcagcacctatagttttgttgataacgttgcgtttcgtttaatgaaaaacaacacgccgggcaactataccttcatcctgaaggggacgaaggaagtgccacgccgtctgttgcaggaaaaacgcaaaaccatcggtatgcgtgtgccttctaaccctatcgctcaggcgttacttgaagcattgggcgaaccgatgctttccactagcctaatgctgccaggcagcgaatttaccgaaagcgacccggaagaaattaaagatcgtctggaaaaacaggtagatttgattattcacggcggctatctcgggcagaaaccgacaacggttattgatcttaccgatgatacgccggtcgtggtgcgtgaaggcgtaggtgatgtgaagcctttcttataacaaattgcgttccacggatggaagactatggcagggaagtttcgctgcattttgctgttgatagcagggctgtttgtaagttctctaagttatgcagaaaacacggagatcccttcttatgaagaagggatcagcctctttgatgttgaagccactctgcaaccagatggggtgctcgacatcaaagaaaatattcattttcaggcgcgaaatcagcagattaagcacggcttttatcgtgatttaccacgactatggatgcagcctgatggggacgctgcactgctgaactatcatattgttggcgtcacccgtgatggtattcctgaaccctggcatcttgactggcatatcgggttaatgagtattgtcgtgggcgataaacaacgtttcttgcctcaaggcgactatcattatcaaattcattatcaggttaaaaatgctttcctgcgtgagggggattctgatctgctaatctggaacgtgaccggtaaccactggccgtttgaaatttataagacccgtttttctctccagttctctaatattgcgggtaatccatttagcgaaatcgatctttttaccggagaagagggcgacacatatcgtaatggccgcatccttgaggacggaagaattgaatcccgcgatccgttttatcgtgaagatttcacggtcctctaccgctggcctcacgctttacttagcaatgccagcgctccgcaaacgacgaatattttcagccatcttcttttaccctccacgagtagcttgttaatttggtttccgtgtctgttcctggtttgtggatggttatatctctggaagcgcaggccgcaatttacgccggtagatgtgattgaaaccgatgtcattccgccagattacacgcccggcatgttacgtctcgatgcgaagctagtttacgacgataaaggtttttgtgccgatatcgtaaatctgattgtgaaaggaaaaattcatctggaagatcagtctgacaagaaccagcaaatcctgattcgtgttaatgaaggcgcgaccagaaataatgcggtattactgcccgcagagcagttattactggaagcgttatttcgtaaaggcgataaggtcgttcttacggggagacgcaacagagtcttacgcagggcatttttacggatgcagaaattttatctgccgcgtaaaaagtctagcttttaccggtctgatacttttttgcaatggggtggactggcaatattggcggtcattctttacggtaacttgagtcctgtaggctgggcaggaatgagtctggtgggcgatatgtttattatgatctgctggattattccttttttattttgttcccttgagcttttgtttgcccgcgatgatgacaagccttgcgttaatcgtgtaatcatcactttgtttttaccactgatttgtagtggcgtggccttctattctctctacatcaatgtcggagatgtattcttttactggtatatgccagcgggttattttaccgctgtttgcctgaccggttatctcactggcatggggtatatttttctgccaaagtttacccaaactggacagcaacgttatgcccacggtgaagctatcgttaactatcttgcgcgtaaagaggcagcaacacacagtggacgtcggcggaaaggggaaacacggaaactggattacgcgttgctaggttgggctataagcgcaaatttggggagggaatgggcgttacgcattgcccctagcctttctagcgcgattcgcgctccagagattgcccgtaacggcgttttattcagtttacagacgcacctaagttgcggggccaataccagtttgttggggcgaagttattccggtggtggtgctggcggcggcgcgggtggcggaggcggtggtggctggtaattaagctgatgttaatcgaaacaagctttaaccataaagatagtgtagtatgttgcgcctcaaagccaggccgataaacgtcgagtcgtttacttaaggcctgaagagttcaaacagactttactatcagtgagtcagatgtaagttctgactcactgttgcacaaaagcatatcagacgcctgggaaggcgacaccaaaaggaagctctatgagcgaaaagctacagaaagtgctggcgcgtgccggccacggttctcgccgtgaaatcgaatctattattgaagccggtcgtgtgagtgttgatggcaaaattgctaaactcggcgatcgtgttgaagttacccctggattgaaaatccgtatcgatggtcacctgattagcgtacgtgagtccgctgaacaaatttgtcgcgttctggcctattacaaaccggaaggtgagttgtgtacccgtaacgatccggaaggacgtccaacggtgtttgaccgtctgccaaaactgcgtggcgcacgctggattgccgtgggtcgcttggacgttaatacctgtggtctgctgctgttcaccaccgatggtgaactggcaaaccgtttaatgcacccaagccgtgaagttgaacgtgaatatgccgtgcgtgtatttggtcaggttgacgacgcgaaactgcgtgatttgagtcgtggcgtgcagttggaagatggtccggcagcttttaaaaccatcaagttcagcggcggcgaagggatcaaccagtggtacaacgtgactctgaccgaaggccgtaaccgtgaagttcgtcgtctgtgggaagcggttggtgtgcaggtgagccgcctgatccgtgttcgttacggtgatatcccactgccaaaaggtctgccacgcggtggctggacggagctggacctcgcccagactaactatctgcgcgaactggtggagctaccgccagaaaccagctctaaagtcgctgtagaaaaagaccgtcgtcgcatgaaggcgaatcagattcgtcgtgcggtgaaacgtcacagtcaggtgagcggcggtcgtcgttctggcggacgtaataataacggttaatcaaagtatgccggacgtcatatccggcatttttacagattaataatcgatccctatctgcgcttttacaccggcatcaaacgcatgtttgacggggcgtaattcacttaccgtatctgccagttcaagaatatcccgatgacaaccacgacccgtgataatcaccgtctgttgatgtggacgttcatttaacgcctgcaccacttcttccagtggcaaatagtcatacgccaccatatacgtcagttcatcaagcaaaaccatatccagactggaatcagcaagcatccgctttgcatgttgccagacttcgcggcaggcggcggtatcagactcgcggttttgtgtatcccaggtaaagcccgttgccatcacctgaaactcaacgccatgtggctccagcagattgcgttcgccattaggccaggtgcctttaataaactgcacgacgcctactttttttccgtgaccaactgcgcgtgttgccgtaccaaatgccgcggtggttttgccttttccattgccggtaaagacgatgataataccgcgttcatcctgggcctgggccacacgagcatctactttttctttcactcgctgctgacgctgttggtagcgttcatcactcattgggaaattcctggtttacggcccggttgggcgtcaaaggtcatgccggttttacggcggctgtcatcgcccatcagccagaggtagagcggcatgatatcagcgggtgttttaagtttctgtggatcttcggtcgggaaggcgctggcacgcattgcggtgcgcgtaccgcctgggttaatgcagttgacacgcaggcgctgctgatattcatcggccagtacctgcatcatcccttcggtggcaaatttgctcgctgcatatgcaccccagttggctcgtccctgacgtccaacgctactactagtaaagaccagactaccggcgtcgcttttgagtaataaaggaagcagtgcctgggtgagcataaaggtggcattaacgttgacctgcatgacgtcctgccagacctgcggattttgttcgctcattgggcaaacatcgccgagcaatccggcattatgcaaaacaccatccagacgcggataattaacggcaatgcgctgtgccagttgttggcaattttcggacgtgcaggtcagcaaatcgagaataaaccactgtggctgacgcccagtttcttcgtttatgtggctggctacctgacgtaatttttcttcattacggcccaacagaatcactgtcgcaccatagcgtgcatacgtcatcgcggcttcacgaccaataccatcgctggctcccgtcaccaggataatgcgatcattgagtaaatcttgttttggctggtaatgcatggctactcctcaacgacgttgtctgtcgcgctgccagtgtactttatgactttggggctttatgcctgaaacagaagggcatttcaatcagcctggggcgataacaccgcaaaatggatactttgtcatactttcgctgcaataacatctctgcgagacggcttaacatgcctgttgtaaactgtgagccaaagcgttgtttaaccaaggtggggactcgtggaattgttgtctgaatatggtttgtttttggcgaaaatcgttaccgttgtgctagcgattgcggcgattgccgccattattgtcaatgttgctcaacgtaataaacgccagcgtggcgagttacgggtcaacaatctcagcgaacagtataaggagatgaaagaagaactggccgcggcgctgatggacagtcatcagcaaaaacagtggcacaaagcgcagaagaaaaagcataagcaagaagcgaaagcagcaaaagcgaaagccaaactgggcgaggtggcaactgacagtaaaccccgcgtctgggtgctggattttaaaggcagcatggacgcccatgaagtgaacagcctacgtgaagagataacggctgtactcgcagcattcaaaccgcaggatcaggttgtgctccgtctggaaagccctggtggcatggtgcatggttacgggctggcggctagccaactgcagcgtctgcgcgataaaaacattcctttaactgttacggtagacaaagtcgctgccagcggcggttacatgatggcctgtgtggcggacaaaattgtttccgcaccgtttgctattgtgggttccattggcgtggtggcgcaaatgcccaactttaaccgcttcctgaaaagcaaagatattgatatcgaactgcacactgccgggcagtataagcgcacgctgacgttgctgggtgaaaataccgaagaagggcgggagaaattccgcgaagagttgaacgaaacgcatcagttgtttaaagattttgtgaagcgtatgcgtccttctctggatattgaacaggtggcaacgggtgaacactggtacggacaacaggcggtagagaaaggcctggttgatgaaatcaacaccagtgatgaagttattcttagcctgatggaaggccgtgaagtggtcaatgtacgctatatgcagcgtaaacgactcattgaccgattcaccggcagcgcggcagagagcgccgatcgattgttgctacgctggtggcagcggggtcaaaagccattgatgtaaaagacaaacgcgaggctaagacctcgcgttttgctttaatcaaccagatgatatttttcactaagcacatgggccaggtgtttgaacatattaaacaccgcggtgcttttggctgttggcaatccttgttcatctaaaaagtagtcgccggtaaataccagcacgccattacgctgcgtgacgccggtggcttcaatccctgcgagcgtatcctcatgctcacgaatgattttgttggcctctttcaacagcgtttcgcggtcgatgggttgtgtctctttgttcattatttactccttaaacaaggacattagtctacgccaggcatggcttgcagacaaatataccacgctggtggcaagagcgccttactggcaactttggattttgcatgctaataaagttgcgtatcggattttatcaggtacagtgtgacgctttcgtcaatctggcaatagatttgcttgacattcgaccaaaattccgtcgtgctatagcgcctgtaggccaagacctgttaactcagtcacctgaattttcgtgaacagagtcacgacaaggggttgatatccgcagagagcgagtccatatcggtaactcgttgccagtggaaggtttatcaacgtgcgacgcattcctggaagaatcaaattaggtaaggtgaatatgggtaaagctcttgtcatcgttgagtccccggcaaaagccaaaacgatcaacaagtatctgggtagtgactacgtggtgaaatccagcgtcggtcacatccgcgatttgccgaccagtggcagtgctgccaaaaagagtgccgactctacctccaccaagacggctaaaaagcctaaaaaggatgaacgtggcgctctcgtcaaccgtatgggggttgacccgtggcacaattgggaggcgcactatgaagtgttgcctggtaaagagaaggtcgtctctgaactgaaacaactggctgaaaaagccgaccacatctatctcgcaaccgaccttgaccgcgaaggggaagccattgcatggcacctgcgggaagtgattgggggtgatgatgcgcgctatagccgagtggtgtttaacgaaattactaaaaacgcgatccgccaggcatttaacaaaccgggtgagctgaatattgatcgtgttaatgcccagcaggcgcgtcgctttatggaccgcgtggtggggtatatggttagcccgctgctatggaaaaagatcgctcgtggcctgtctgccggtcgtgtgcagagcgtggcggttcgcctggtggtcgagcgtgagcgtgaaattaaagcgttcgtgccggaagagttctgggaagtcgatgccagcacgaccacgccatctggtgaagcgttggcgttacaggtgactcatcagaacgacaaaccgttccgtccggtcaacaaagaacaaactcaggctgcggtaagtctgctggaaaaagcgcgctacagcgtgctggaacgtgaagacaaaccgacaaccagtaaacctggcgctccttttattacctctacgctgcaacaagctgccagcacccgtcttggatttggcgtgaaaaaaaccatgatgatggcgcagcgtttgtatgaagcaggctatatcacttacatgcgtaccgactccactaacctgagtcaggacgcggtaaatatggttcgcggttatatcagcgataattttggtaagaaatatctgccggaaagtccgaatcagtacgccagcaaagaaaacagtcaggaagcgcacgaagcgattcgtccttctgacgtcaatgtgatggcggaaagcctgaaggatatggaagcagatgcgcagaaactgtaccagttaatctggcgtcagttcgttgcctgccagatgaccccagcgaaatatgactccacgacgctgaccgttggtgcgggcgatttccgcctgaaagcacgcggtcgtattttgcgttttgatggctggacaaaagtgatgcctgcgttgcgtaaaggcgatgaagatcgcatcttaccagcagttaataaaggcgatgctctgacgctcgttgaacttacaccagcccagcactttaccaagccgccagcccgtttcagtgaagcaagcctggttaaagagctggaaaaacgcggtatcggtcgtccgtctacctatgcgagcatcattagcaccattcaggatcgtggctacgtgcgagtagaaaatcgtcgtttctatgcggaaaaaatgggcgaaatcgtcaccgatcgccttgaagaaaatttccgcgagttaatgaactacgactttaccgcgcagatggaaaacagcctcgaccaggtggcaaatcacgaagcagagtggaaagctgtactggatcacttcttcagcgatttcacccagcagttagataaagctgaaaaagatccggaagagggtggtatgcgcccgaaccagatggttctgaccagcattgactgcccgacttgtggtcgcaaaatggggattcgcacagcgagcaccggggtattccttggctgttctggctatgcgctgccgccgaaagagcgttgcaaaaccaccattaacctggtgccggaaaacgaagtgctgaacgtgctggaaggcgaagatgctgaaaccaacgcgctgcgcgcaaaacgtcgttgcccgaaatgcggcacggcgatggacagctatctcatcgatccgaaacgtaagttgcatgtctgtggtaataacccaacctgcgacggttacgagatcgaagagggcgaattccgcattaaaggttatgacggcccgatcgttgagtgtgaaaaatgtggctctgaaatgcacctgaaaatggggcgtttcggtaaatacatggcctgcaccaacgaagagtgtaaaaacacacgtaagattttacgtaacggcgaagtggcaccaccgaaagaagatccggtgccattacctgagctgccgtgcgaaaaaagtgatgcttatttcgtgctgcgtgacggtgctgccggtgtgttcctggctgccaacactttcccgaaaagccgtgaaacgcgtgcgccactggtggaagagctttatcgcttccgcgaccgtctgccggaaaaactgcgttatctggccgatgcgccacagcaggatccggaaggtaataagaccatggttcgctttagccgtaaaaccaaacagcaatatgtctctagcgaaaaagacggaaaggcgactggctggagtgcattttatgttgatggcaaatgggttgaaggaaaaaaataacctttaattctgtcaggtttttataaacaaagggtcgcgaaagcggcccttttttattgcatattattttttcttcacacctatacactaaggctataaatgatatagtggttatagttagcaccttttttattattaaatcgtattagtcacccgccaggtgtgacgaaaaaacgatgttctgatggcgtctaagtggatggtttaacatgaaattacaacaacttcgctatattgttgaggtggtcaatcataacctgaatgtcagtagtacagcggaaggactttacacaagtcaacccgggatcagtaaacaagtcagaatgctggaagacgagctaggcattcaaattttttcccgaagcggcaagcacctgacgcaggtaacgccagcagggcaagaaataattcgtatcgctcgcgaagtcctgagcaaagtcgatgccataaaaagcgttgccggagagcacacctggccggataaaggtagtctgtatatcgccaccacgcatacccaggcacgctacgcattaccaaacgtcatcaaaggctttattgagcgttatcctcgcgtttctttgcatatgcaccagggcagcccgacacaaattgctgatgccgtctctaaaggcaatgctgatttcgctatcgccacagaagcgctgcatctgtatgaagatttagtgatgttaccgtgctaccactggaatcgggctattgtagtcactccggatcacccgctggcaggcaaaaaagccattaccattgaagaactggcgcaatatccgttggtgacatataccttcggctttaccggacgtagtgaactggatactgcctttaatcgcgcagggttaacgccgcgtatcgttttcacggcaacggatgctgacgtcattaaaacttacgtccggttagggctgggggtaggggtcattgccagcatggcggtggatccggtcgccgatcccgaccttgtgcgtgttgatgctcacgatatcttcagccacagtacaaccaaaattggttttcgccgtagtactttcttgcgcagttatatgtatgatttcattcagcgttttgcaccgcatttaacgcgtgatgtcgttgatgcggctgtcgcattgcgctctaatgaagaaattgaggtcatgtttaaagatataaaactgccggaaaaataatttcttgcgttattttcggcaccttttatgtagcgaaggtgccggaatatattctcttttgttacttatttctataccgtgcacaatatttttatccctcatatttatagggtaaattacctgtaaagtagtgtctaattacccgcctcgcaaactccagttttcaaatatctatttcaggtcaaaagattgaattattcactggagacgattcgtaaattcgctggatttttgactaaagtttctttaggatttgtctcatcgtatgattaattacaccaatcgttcaacgtcttgctgataagtgatggcgattatatgaggttagcaatgccttctggaaatcaggaaccccgccgcgatcctgaattaaaacgtaaagcctggctggcggtttttcttggttctgcacttttctgggtggttgtcgcactgctgatttggaaagtgtggggataactatggtcggtcaggagcaactggagtcgtcaccattatgccagcatagtgacaatgaaacagaaacgaaacgggaatgttccgtcgttattccagacgactggcaactaacatcgcagcagcaagcctttatagaactgtttgctgaagatgatcagccgaaacaataattatcatcattcttattacccatttttaatgaattaaagggcttttaatacaccgcagcaataacagcttgagttatctcaacacaaaataataaccgttaagggtgtagcctatgatcaacacaaatatgaaatattggtcctggatgggcgcgttttctctgtcgatgctcttctgggccgaactcctctggatcattactcactgatccttgaccccgctgcggcggggttgtcatttgctttgccacaaggtttctcctcttttatcaatttgggttgttatcaaatcgttacgcgatgtttgtgttatctttaatattcaccctgaagagaatcagggcttcgcaaccctgtcattaaggaggagctatgagcagtaccctacgagaagccagtaaggacacgttgcaggccaaagataaaacttaccactactacagcctgccgcttgctgctaaaagtctgggcgatatcacccgtctacccaagagtctcaaagttttgctcgaaaacctgctgcgctggcaggatggtaacagcgttaccgaagaggatatccacgcgctggcaggatggctgaaaaatgcccatgctgaccgtgaaattgcctaccgcccggcaagggtgctgatgcaggactttaccggcgtacctgccgttgttgatctggcggcaatgcgcgaagcggttaaacgcctcggcggcgatactgcaaaggttaacccgctcagtccggtcgacctggtcattgaccacagcgtgaccgtcgatcgttttggtgatgatgaggcatttgaagaaaacgtacgcctggaaatggagcgcaaccacgaacgttatgtgttcctgaaatggggaaagcaagcgttcagtcggtttagcgtcgtgccgccaggcacaggcatttgccatcaggttaacctcgaatatctcggcaaagcagtgtggagtgaattgcaggacggtgaatggattgcttatccggatacactcgttggtactgacagccacaccaccatgatcaacggccttggcgtgctggggtggggcgttggtgggatcgaagcagaagccgcaatgttaggccagccggtttccatgcttatcccggatgtagtgggcttcaaacttaccggaaaattacgtgaaggtattaccgccacagacctggttctcactgttacccaaatgctgcgcaaacatggcgtggtggggaaattcgtcgaattttatggtgatggtctggatagtctaccgttggcggatcgcgccaccattgccaatatgagcccagaatatggtgccacctgtggcttcttcccaatcgatgctgtaaccctcgattacatgcgtttaagcgggcgcagcgaagatcaggtcgagttggtcgaaaaatatgccaaagcgcagggcatgtggcgtaacccgggcgatgaaccaatttttaccagtacgttagaactggatatgaatgacgttgaagcgagcctggcagggcctaaacgcccacaggatcgcgttgcactgcccgatgtaccaaaagcatttgccgccagtaacgaactggaagtgaatgccacgcataaagatcgccagccggtcgattatgttatgaacggacatcagtatcagttacctgatggcgctgtggtcattgctgcgataaccagctgcaccaacacctctaacccaagtgtgctgatggccgcaggcttgctggcgaaaaaagccgtaactctgggcctcaagcggcaaccatgggtcaaagcgagcctggcaccgggtagcaaagtcgtttctgattatctggcaaaagcgaaactgacaccgtatctcgacgaactggggtttaaccttgtgggatacggttgtaccacctgtattggtaactctgggccgctgcccgatcctatcgaaacggcaatcaaaaaaagcgatttaaccgtcggtgcggtgctgtccggcaaccgtaactttgaaggccgtatccatccgctggttaaaactaactggctggccagcccgccgctggtggttgcctatgcgctggcgggaaatatgaatatcaacctggcttctgagcctatcggccatgatcgcaaaggcgatccggtttatctgaaagatatctggccaagcgcacaagaaattgcccgtgcggtagaacaagtctccacagaaatgttccgcaaagagtacgcagaagtttttgaaggcacagcagagtggaagggaattaacgtcacacgatccgatacctacggttggcaggaggacagtacctatattcgcttaagccctttctttgatgaaatgcaggcaacaccagcaccagtggaagatattcacggtgcgcggatcctcgcaatgctgggggatagtgtcaccactgaccatatctctccggcgggcagtattaagcccgacagcccagcgggtcgatatctacaaggtcggggtgttgagcgaaaagactttaactcctacggtagccggcgtggtaaccatgaagtgatgatgcgcggcaccttcgccaatattcgcatccgtaatgaaatggtgcctggcgttgaaggggggatgacgcggcatttacctgacagcgacgtagtctctatttatgatgctgcgatgcgctataagcaggagcaaacgccgctggcggtgattgccgggaaagagtatggaagtggctccagtcgtgactgggcggcaaaaggtccgcgtctgcttggtattcgtgtggtgattgccgaaagctttgaacgaattcaccgtagcaatttaattggcatgggcatcctgccgctggaatttccgcaaggcgtaacgcgtaaaacgttagggctaaccggggaagagaagattgatattggcgatctgcaaaacctacaacccggcgcgacggttccggtgacgcttacgcgcgcggatggtagccaggaagtcgtaccctgccgttgtcgtatcgacaccgcgacggagttgacctactaccagaacgacggcattttgcattatgtcattcgtaatatgttgaagtaacaactatttgcttgccggttattttgcttccggcaagcaaatgaattacacaatgcaagagggttatttgttcagcaaatggcccattttctcggctttggtatcgagataatgttcgttattggggttacgacctacaatcaatggtacgcgttcaacaatattaatccctgcttcggtcagaatttcgacttttttcgggttattggttaacaagcggacttcattgacgccaaggagtttgaacatatcagcgcaaagagtgaagtcgcgctcatcagcggcgaagcctaactggtggttagcctctacggtatcgtaaccttgatcctgcagtgcgtaagcgcggattttattcagcagaccaatgttacgaccttcctgacggtgatacagcaaaataccacggccttcctcggcaatttgcgtcaatgccgcttcgagctggaagccacaatcgcagcgcaagctgaacagggcgtcaccggtcagacattcggaatggacgcgcgcaagtaccggggtatgcccggaaatatcgccatagactagcgcgacatgatcgtgtccggttgccagttcttcaaatcccaccatcaggaaatcgccccatggggttggcagtttggcttctgccacacgtttaagctgcatgaaattctccagataatgctggttctgtattggcttattttgccataacgagaaggggttcacctaatcacgacgcgtcgatcgttcacggaatggcacaaatctgtcaatttttcctggaactggcgttttcagttatgattgtgggacttatcaaaaaggagaggccatgcgtagcattgccagacgtaccgcagtgggagctgcactattgcttgtcatgccagtagccgtatggatttctggctggcgttggcaacctggagaacaaagttggctactaaaagcggctttttgggttactgaaactgtcacccagccctggggcgtcattacacatttgattttattcggctggtttctctggtgtctgcgttttcgcattaaggctgcctttgtattatttgccattctggcggccgcaatccttgtgggacaaggcgttaaatcctggatcaaagacaaagtccaggaaccacgaccttttgttatctggctggaaaaaacacatcatattccggttgatgagttctacactttaaagcgagcagaacgcggaaatctagtgaaagaacagttggctgaagagaaaaatatcccacaatatttgcgtagtcactggcagaaagagacggggtttgcctttccttccggtcacacgatgtttgctgccagttgggcactgctggccgttggtttgctgtggccgcgtcggcgaacgttaaccattgctatcttgctggtctgggcaacgggagtcatgggaagccgcctgctgctcgggatgcattggccacgcgatctggtagtagctacgttgattagctgggcgctggtggcggtggcaacgtggcttgcgcaacgaatttgtgggccattaacaccacctgcggaagaaaatcgcgaaatagcgcaacgagaacaagaaagttaacgctggttgattttccgaatttagcccttaaatcatcaacaatgcgtgtggatgccatttcgcagacggcgcgaaaatggtactttaaagggctattgcggtaagttgaccataatttattcgctctaaccacataacgggaagtaatgtgaaatatttactcattttcttactggtgttagcgatcttcgtgattagcgtcacgttgggtgcgcagaacgatcaacaggtgacgtttaattatctgttagcgcaaggggagtaccgtatttccacattgctggcggtattgtttgctgcggggtttgctatcggttggttgatttgtggcctgttctggctgcgagttcgtgtttccctggcgcgcgctgaacgtaaaataaagcgactggaaaaccagcttagtcccgcgactgacgtggctgtagtgccgcacagcagtgcggcgaaggaataactttctatgctggagttgttgtttctgcttttgcctgtagccgctgcctatggctggtatatgggccgcagaagtgcgcaacaaaacaagcaagatgaagccaaccgcttgagccgtgattacgtagcgggggttaacttcctgcttagtaatcaacaggataaagcggtagacctgtttctcgatatgcttaaagaggatacaggcaccgttgaagcccaccttacgctcggaaacctgttccgtagccgtggcgaagttgatcgcgctattcgcatccatcagaccctaatggaaagcgccagcctgacctatgaacagcgtctgttggcgattcaacaactggggcgtgattacatggccgccgggttatatgaccgcgcggaagacatgttcaatcagctgaccgatgaaactgacttccgcattggcgcgctgcaacagttgctacaaatctaccaggctaccagtgagtggcagaaagcaattgatgttgccgaacgcctggtgaagctgggtaaagataaacagcgcgtcgaaattgcccatttctactgtgagttagccctgcagcatatggccagcgacgatctcgatcgtgccatgaccttgctaaaaaaaggggcggcggcagataaaaacagcgcccgcgtatccataatgatgggacgcgtgtttatggcgaaaggagaatacgccaaagccgtcgaaagtctgcaacgcgtgatatcccaggacagagaactggtcagcgaaacgctggaaatgttgcaaacctgctatcagcagttgggtaaaactgccgaatgggcagaattcctgcagcgtgcggtggaagagaacaccggtgccgatgctgaattgatgcttgctgatatcatcgaagcgcgcgacggtagtgaggccgcacaggtctatattacgcgccagcttcagcgtcatccgaccatgcgtgtgttccataagttaatggattaccacttaaatgaagcggaagaagggcgtgccaaagagagcctgatggtgctgcgtgacatggttggcgagaaggtacgtagtaagcctcgttatcgttgccagaaatgtggttttaccgcatacaccctctactggcattgtccgtcttgtcgggcctggagtaccattaaaccgattcgcggtcttgatggcctgtaatttttaaaaaaaatccgactttagttacaacatactaattattaatgttccattgtgctccggcaacgacggcgcagaaaaagcctgccaggggagaaatcgcaactgttaattttttatttccacgggtagaatgctcgccgtttacctgtttcgcgccacttccggtgcccatcatcaagaaggtctggtcatgacgttaactgctagttcttcttcccgcgctgttacgaattctcctgtggttgttgcccttgattatcataatcgtgatgacgcgctggcctttgtcgacaagatcgacccacgcgattgtcgtctgaaggtcggcaaagagatgtttacattgtttgggccacagtttgtgcgcgaacttcaacagcgtggttttgatatctttcttgacctgaaattccacgatatccccaacactgcagcgcacgctgtcgctgctgcagctgacttaggcgtgtggatggtgaatgttcatgcctctggtggggcgcgtatgatgaccgcagcgcgtgaggcactggttccgtttggcaaagatgcaccgcttttgattgctgtgacagtgttgaccagcatggaagccagcgacctggtcgatcttggcatgacactgagtcctgcagattatgcagaacgtctggcggcactgacgcaaaaatgtggccttgatggtgtggtgtgttctgctcaggaagctgtgcgctttaaacaggtattcggtcaggagttcaaactggttacgccgggcattcgtccgcaggggagtgaagctggtgaccagcgccgcattatgacgccagaacaggcgttgagcgctggtgttgattatatggtgattggtcgcccggtaacgcaaagcgtagatccagcgcagacgctgaaagcgatcaacgcctctttacagcggagtgcatgatgagtgattccaacagccgtctggtctacagtacggaaaccggacgtattgatgagtccaaagcggcccctgtacgccctaaaggcgacggtgtggtgcgtattcagcgtcagaccagtggacgtaaaggtaagggcgtttgcctgattaccggtgtcgatctcgatgatgccgaactgacaaaacttgcagcggaactgaagaaaaaatgcggctgcggcggagcagttaaagatggagttattgaaatccagggcgataagcgtgatttattaaaaagtctacttgaagcgaaagggatgaaggtaaaactcgcaggcggttaacataaaaagccacggatatatccgtggctttcgaatattttactgtgcgtattattcagttatttcgtactgaacagaatcaagcgtattataattgcgagtcgataatcgacatttatttacgattatttaccgacctggtgaccaataacacctccgacagctgcaccacctaatgtacccaacgtactgccatcggtcagtactgcaccgcctaatgcccctgcacccgcgccgattgcggtgttgcggtcccgtttagaccagttagaacaggcactcagagacattgccaaagtaattgccagaacagccgcggtcatttttttgctcgttacaaacataatactctctcctgaatttatgattcacggaagtaagctctctataactataatagctaagaataagtctggtgaaattattccgtgaaatctgctcgcgcgcagggttatatcacgcaggtgataatgacttcctgttatatcgctgataataattttatatcttgagagtgttaataacaggtaaatagtcttaattatcaaccaggaatcatcttagagcggatgatttgccaaactgcaaatcatccgtagagaagggaaatggttaaatgtcaacgacgtgaatggtgagtttactgtgctcaagatgcatcagatcgctggcgcgtattttgctatcggtaatcacgcgattgaatcgctcaacgggaccgatggagtaactatgtacagcaccaaatttgctgctgtcagtcaggactatcgcttcgcactctttttccagcacggcattgaccacatcggtacgcatcatatcgcgaccggtaaatccagtttcaggttgccagccatcaataccaataaatgctttgctgaaatgcacctgttggatgcactggcgtgtcaaagggccaaccatactttcgctttttttctgatacacgccaccgagcaaaataacttcacaaggcgcgtctttcagcaaatgcgcgatgtagctgctgaccgtgatgatagtgacatttttcttctgctcgcccagagtccgggcgagtagggcattgctgctgccattttcgataaagatggtttcgcccggttgaaccaggctcgcggcaaactcggcgagttcacgcttcagcgtatagttgctcatcatacgggtttcgacgtcatcactatcaaggctaacagcaaagccatgtgcacggcggaggtaactcagtttttcgagtgtgttgagatcctggcgaatggtaacttcagaaactccagtggcttttgccagatcggttacgctaacctgaccctggtcaatgaccatctgtagaatagtttgttgtcgggaattcatcgctgtaattcttataacgttataatacttaataaaaaaatactgacgcgccgggcatcctcaaataggaaaacctgaaggcacgattgttaaatctcccacggtgccttcgggatgtctggcgtagattcagcaacctggcgcaagagttctgctttaagtatctcgagattatggatcgcagagtggtaatcgcctgccacaaggatatctaacacaatatcaatacgttcggcaacgcgctgggcatcaaattcagacatcaaggacatccttatagcaaaagggggaaaatgaataatgcaaaaattgccgctaaaagagaagtgtttaacagcaacggctaattatcatccaggaatacgatatataatgacgggatatagcgctaagtatatatattcatctacttatgcgcgcttcagatagcgtttataccagcgttcgaaggcgacggcgggcatcggtttggcaaacaaaaatccttgccgctcattgatcccgttcttggttaaaaaagcatcttcctttgcactctctacaccttcggcgatcacctgaagattcaatgcctgggccacagcgacgatcgcccggaccagactctggctgacaggttgtttgtgaatatctcgaacaaaaacctggtcaagtttgatggcatcgatcggaaagcgcgccagttggctaagactagagtagccggtaccaaaatcatccagatgcacttgcgcacctagttggctaaattgttgaataacagacagtgccagttcatcattctcaatcagacaactctctgtcagttcaacatctatagggcagtattcaaaattgagttcctggagaacctgtttcagggcggtgaaaatggtttgatcggcgagctgacgtgcagaaatatttaccgccactcgcaggtttatgcctttatcccgccactttgccacctggcgtacgacatcgagaatcacccaacggcctaaaggcacaattagcccactctcttcggcgtaggaaatgaagtccaacggtggaatcaacccacgttcaggactctgccaacgtactagtgcttccagactgcgcacttcgccacgccaggtgattttcggttgatagtgaataaccaactgatcgttttccagtgctttacgcaagttggtatccagccagagatattcaaatacccgttgattcatttctggggtaaaaacgcaaaattgtcctcgtccgccttccttcgctgtgtacattgctgtgtcggcgtgacgaataatagccgtgctgtcactaccatgttcgggagagagtgcaatacctacactacagctggtataaacttcaattaaaccaatgcgaaaggggagccgtaagcgggtcaaaattcgacttgccattgcttccagcgcgctttgactggtgttggatgccagtaccagaaactcatccccacctggacgagccaacacctggtcatgttcgagacagcttaaaatagccaaactcacgtcgcgtaataactggtcaccaaacaaatgcccataggcgtcgttgacctttttgaaattatccaaatcaagatacacaaccccaactttattgttatctgcatgattaatagcgtgatcgattaaatcctgcattgcgttacgattcggcagtccggtgatactgtcggtatttgccagaatacgcagtcgctcctgagcgcggcgctcttcggtaatgtcggtgccggaacagattaaaaaaatctcgtttttgccactgccgctgtggacaaatttattgcgaaacagaaacagccgctggcctttacatgttggtatccacagttcgacttcatatgcattgccgcttcgaaaaaatacacggttattgcgcctggatgccgcagcttcacgacggctcataaacagtttaaacacgctttgcccaatgacgtcgtgttctttcaaccctgtgtaatcttcacataaccgattgaagcgttggatattcccccggctgtcgagaatcactattgcggaatgtgcttcagaaactacctgctcagcaaaggaaagcccgtgacttaaatcacgagcaaccgccggtgtgtcatgccatgcagacgcgttgccagcccattcccgtttattgatttttcgtcctaccagatgcacagaaagatcgctttcatcgacggtcagactcatcatcaggctggaggtgatgaccgtcatttccctgatgcgagcagcctgttcggcagataactgcaatgtacgatcaggttctgtggtttcggtggtagaaaagcgcaaaacatcgctgctttccgtcaaccgccagtatggattgtggcttccgagaaagttgtacaacgttgtggactccctaacggttttcatgatgcatatcctccggttaacagcggagtccgcggttaaataaaaggaacaacatgacttacatgaaattaacggcggctaaacgcattgttttttttatatatttatttgtaatccagttttggaaaaacgccagttttcaaacgaaagtcagttaaaaaatctgcctggatataacgaaggtagagcggggaaataaacggcccatccatgaggaatgggccgtgaaaggagattacgcgaccgggcgcgcaataatgctgcgggtttccatgcggacttcggcaatagtgacgtcaataacgtcagtcactttgtaaaccgtttcacctttaatttgtacagtgccgttttcctggctgcaaaccagttcatcgcgcacagcgtgtaagaaaggtgccggaataaaggcgatagcgccgttatcaaccaaacgaacacgcatgccgccacggctgatatcgacaatttccgctgcgaaacgggtgtcggtcccggctttgtctttcaggaagcgtgcgtataaccagtcaccaacatcacgttctgccatccggttgagacggcgacgctcggccatttggacagtgatttcatcctgtgggcgcgtcgcagtttcgcctttgataaccgctttcagcagacggtggttgatcatgtcgccatatttacggatcgggctagtccaggtggcgtatgcttccagaccgaggccaaagtgaggaccgggttcagtgctaatttcagcaaaactctggaagcgacgaatgcggctgtcgaggaaaccagttggttgcgcgtccagttcacgacgcagtttgcagaaaccgtccagcgtgagcacttcttcggcatcgacatgcagaccgtgcgttttcagcaacgctgccagcgcgtcggcattcgccggatcaaagcccatatgcacgttatagatgccaaaaccgagcttatcgcgcagtacgcgggccgcacaaatgttagcggcaatcatcgcttcttcgacgatacggttggcaatgcgacgaggctcggcgacgatatccagcacttcacctttttcaccgagaataaagcggtaatccgggcgatctttaaacaccagtgcgtggttatgacgccactcgccgcggcgttggcaaatttgcgctagcaaacggacttgttcggcaattgcttcactttcaggctgccagtcaccggtattttccagccagtcagaaacctggtcatacaccagctttgctttggattcgatggtggcggcaaagaattcgatattatcttcaatggtgccatcagcggagagcgtcatgcggcatgccagtaccgggcggacttcattggcgcgcagactgcagagatcgtcagaaagctcgcgaggcagcatagggatgttgaagccaggcagatagttggtgaatgcgcgaattttcgcggctttgtccagcttgctgccttcagcaatccacgcggttggatcggcaatcgccacaatcagctgaagtttgtcatccggcaacgccttagcgaaaagggcgtcatccatatcttctgtgctggcactgtcgatggtgacaaaatccagcgcggtcagatcttcacgaaccagaccttcatcgagcatttcggtagcgacgccgtctggtgcttctttttccagattatggcgtgcaagggtaacccaccacggtacaaagtgatcgtcaccaaaagtgatgtattgtgtcagttctgcatagaaagaacgatcgcctttcagcggatgacggcgcatttcggcaaccgcccagtcgccttctttaaactcgtggttcaggccacgggctgcgcggcaaggaatggcgtcttttaagagtggatgatcaggaacgatggccagacggtcatttttgccctgaaccttacccacgaaacgagtcaggaacggttcaaccagttcttctggctctgcggattcacgttctttttcactgtggatcaccgcgataattcggtcgccatgcatgacttttttcatctgcggcggcggaatgaaataacttttttgcgcgtcgacttccaggaagccaaagcctttttctgtggcttttaccaccccttcagcgcgtggcgtctgggaatgcagttgctgtttaagctgcgctagcagcgggttgtcctgaaacataattgtctattttggtggccattagagcggctgacagttttacgcgaatctgtctgacgcggcaaggttaatatgtctcacccaacgcgatttttaagcgatttatccagccacacagcccgctccataccagcagattaataatctgcgtactacttttttcgtgttcgagtaaagggctgaactgggcggcgctaaagcgatcgggtgctcgggtcagccattgtatcgcctgaacggtagcgcgctcaacagaatgacggtcagcccattggttaatttcattttcgcccttgcgcataagggtgctgatttttttatattcattactactatccatacaggtggcaaaacaagcaggactgccatttatacgcgcgcataacaacgccgcaagctgattatccggctgtgtattgccccgtgtgctgtttaacaacttttcgagaagggaaagactaatagggtggagagagagtatttcggccagttggcaaagttctgcagtactactttttgtgtgctcttcaggtagtttttccacctcatagctgcttcgccagcgtaaactttcatcagcaaacagactcgcgtcggcgtagttttgtatctccagcccgggtaaccagcgtaccggatgcccgagataagcctgaaatgtcgcaattgtccgcgcctgaaagccaataaaaccaatgatttggctaatgatcacacagtcccaggcagtaagaccgacgtcattcagatgctggcggcttcggttgtcgataatagaagggctgctagccagttggcgggcatattgcgtgatttgtgccaaccgatgattactttccctggtggaatcaggcccggggagcggcgtaagtcgcgcgctatagtagttacataaccgctggacgccgcaaacctgagcaaccgtcagggccgtgctcaagcgttcataagcggtgaaggtctgactacgggtcacggtaagctggtcagggaacaaatccactgcaagaacacgcgcagggtccagccaactaaggaagggggccagcgtttctttttcaaggatcacgtcgagtagaaagggatcgctgacctttgcggcttccgggaccagaggcagaacgtcatactccgtagtactggattgcgtttcatgataccagtggcttttgccggtgatgtggcgttgttccatgggcgctccttggtcgtaaaggaaatcgttatcctgacgcaaggcgggaaggggagaaagacggatcggcgataacaaatatcagaaaggtataacagagataacgggcggcagaacgccgcccatctttaccaacagaacgattatttcagttcgagttcgttcattgcagcaatgctgaaaccgccgtcaacgtggaccacttcaccggagataccggcagagagatcggagcacaggaatgccgcagagttacccacatcttcaatagtaacggtacggcgaatcggggtaacggcttcgcaatgagccagcattttgcggaagtctttgataccggaggccgccagagtacggatcggaccagcagagatggcgttaacacgcacaccttccggacccatcgcgttcgccatatagcgcacgttcgcttccagagacgcttttgccagacccataacgttgtagttcgggatagcgcgctcagcgccaaggtaggaaagggtcagcagggcagaacccggattcagcatggagcggcaagcttttgccattgcaacgaagctgtaggagctgatgtcgtgggcaattttgaagccttcacgggtaacggcgttaacatagtcaccatccagctgatcgccaggtgcaaaaccaatagagtgtacgaaaccgtcaaatttcggccaaactttccccagttcagcgaacatggtgtcgatgctggcatcttctgcaacatcgcactgcagaacgatgtcagaacccaattgagcggcaaattcttctacgcggcctttcagtttgtcgttctggtaggtgaatgccagttcagctccttcgcggtgcatcgcctgagcgataccgtaggcgatggatagtttgctggcaacaccggttaccagaatgcgcttaccggaaagaaaacccatagctttaatccttattgttgatgcttgttgtgcctgaaaatcaggcgattcgtcgttttagtaaacagtacgaacagataaacggttattataatcaacctggctgtgagtagctatagttgccaggtccgaccggagcaggctgcggcagggggggcgcttttcccctcaccctaaccctctccccagaggggcgaggggaccgtattgtgcaaatattgttaccccagcaacaaacaggctcatacagcccctaaccctttcatggcgatggctgggacggttcagaccttgccgaatattctccagcaccgtctccatgttttcaccacaacagctattcggctcggtctgccccctcgctctttcagggagagggactccggcggttcagttcctgcagaatattctccagcaccgtctcctcattacaatcaatctcgttattccagaaacgcagcacggtccagccctggctctcaagccagctagtgcgcctggaatcataggcaactgctaaatcatgctgcccaccatccagctcaacgactacacgcgcgctgcagcaagcaaaatcgagaatgtagctccccactggatgttgacggcgaaatttgaaatcactaaaacgtcggctgcgaagatatcgccagagctttcgttcctgcaaagtgagattgcgtcttaaatcacgcgcattacttttaattttatctatcacctcattctgacaagatttaatcttttgtcagaatgaggtgaataatctggaaggaggattcagaaaattagcgatctttacgccacgcatccgccgtcaatgcctcgccaaaatgaccggcaatcagccgtttggtgagttcatgcagcgggcttgccagcacatccgcggtgctgcctcgctcgacaacctcgccctgatgcatcaccagcacctggtcgctaatgtgcttcatcattccgatatgctgggtaacataaatatagctaatgccctgtttttcctgtaattccagcatcagattaatcaactggctacgcatgctcatatccagactagcgagggcttcatcggcaataatgacttttgggcgcaatatcagcgcgcgcgccagacccagacgctgtttttgtccgggtgccaacatatgcggatagtaactgacgtgatccggtagcagcccaaccatacgcatcgtttcaataatctgtttgcgacgctgttccggttccaggtcggtgttcaggcgcagtggaaaatccagaatttggctgatacgttgacggggattcaagctggtgctaggatcctgaaaaatcatgcgaatacgctgactgcggaaggaataatcgccaaaatgcagtggatgatcgtcaatcaataactcgccgctggtaggctctatcattcccgccagcatttttgccagcgtggatttaccgctaccattctcgccaataatcgccagtgtctggccttcacgtagcgtaaagctcaagggttttaccgcttctacggtctgacgacgaaaccagccggtccggtagcggaacgttttacttaaattacgcacttcaagcagcgtttcgatcatctcactctttctccatgttcagcgggaaatgacaggcatagagatgatttttcgcccccgtcaaacgtggcgtcacaatgcattctcgttgtgcatacgggcaacgtggccccagacgacaaccaatcggtaactgttccagcagtgggatagcgccgggcagcgtattgaggcgacttttatgcggcatcgcgctgccgaagtctggtatcgcgcggatcagcgcctgggtataaggatgatgtggcatcgtcaccaactccttactcggcgcggtttccactgtttgaccgcagtaaagcacgttaattttatccgcccattggctaagcatttgtaagtcatggctgataagcaaaatagtggtattgctgttttggttgagacgcgtcagcaggcgaaagatttgcgcctgggttgttggctccatactgttggtcggttcgtcagcaatcagcagacgcggttgattcgccagtgcaatggctatcatcactttctgacattcaccttcggtcaactcatagggaaaactgcgcatcgcatctttgtgatctttaatccccacgcggtgcagcagttcaatggcacggcgtttgcgccagccaaaacgctgccaccaacggcctttataggtccaggctgggatgttttgcatcaactggcggcccacacgttcactagggtcaagacagctctgcggttcctggaaaatcatgctcacgttatggccaaccagtttgcgccgttcgcgtgcggagagacgcagcaaatcgatatcatcaaaacgcatacggtcagcagtaacacgccagttatctttattcaccccacaaatcgctttcgcaatcaaactcttgccggaaccggattcaccaacaagaccgcggatttcaccttcggttaaggtcatacttacccggtcgacggctttaacccactcatcaccggttttaaattcaatggtcaggttacgaatatcgagtaatggcattattccacccccgcaataatcgcacgacgaacgccatcgccaaggaggttaaccaacaacacgctaatcataattgccgcacctggcagcatgacagtccacggggcgacataaatcagttccagcgcatcaccgagcatcgctccccattcagggctggggagttgtgcgccgagatcgagaaagcccagcgcggcgatatcgagaattgccatgctcagtgcgcgggtgatctcggtgaccagcccggcggtgatgtttggcatcacagcaaaccagagaatattcagcgtacttgcgccatccagacgggcggcgataacgtactctttttccagttcgtcatgcaccatgctgtaaatgctacgtaccatacgcggcagcaatgccagccagacagcaaacatagcgtgggacaaactcggtccggcaaacgctacaacgataattgccaacagcaggctagggatcgccagtaaggtatccagaatatggttaagcaccgcactgcggaggccgtgtgtcgccccggcgaaggtgcccagtaccaggccacagatcgtcgcggcaagcgtcaccacaaatgcgccacccacggttggcgcagctccgctcagtaaacggcttaaaacatcgcgtccgaggtcgtcagtccccaggaagaaagaaacttcgccatagcggctccaactcggcggcaataattgataaccgagaaattgctggtcgatgccgtaaggcgcaaaccagccgccaaaaatacacagtacagccagccccgcgcagccgtacaggccgaccatcgcagaggcgtcactataaaatttgcgccaggcggtacgcagcgtgcccggcgggcgcttttcgctgtatacgctatcgtaaggcataccattccttatgtttcagattatttatcgtaaggcataccattccttatgtttcagagggttagccatggcacccaaaatatcagaaatcacgttaacaataatgaccagactgccacacaccatcactccggcggaaatggctgcgtaatcctgctggcggatggcgttaattaaccagcgccctaaacccggccagctaaaaaccatttcggtgatcatcgccagcgtcagcatggtggaaaactgtaagcccaggcgaggaataaccggcggtaacgcgttatgcagaacgtggcgacgcaaaatagtaaagcggctcaaaccgcgggtcgccgccgcttttacatagttctggtcatacacttcgatagtgctgatacgcatcaggcggatcacttcagttgttggcgcaacgctcagggtgatcacgggcaatatcatatggcggattgcgctcatgatcatttcatcccgccatggactgtcgctaagccaggcatcaatcaacgcaaaaccggtaatcggtttcacttcgtagagcagatcgaaacgcccactaacgggcaaccaacctagcgtgagactacaaaacagcgtcaacagaagcgccagccagaacaccgggatactaaagcccagtaaggcgatggcgttgatcaagttatcctgccacttatggcgcgtaatcccggcaatcatccccacggggatgccaacaatcagcgcaaaaccgaaggcgaggatgcacagttccatcgtcgccgggaagacctcttttaactgttcggcaatcggttgaccgttaatgctggaaacaccaaaatcccagtggatcaggccgttaaaccagaacacccaggcattccacagactcgcgccttgtaacggcgcatgaggggtgaaatagctcaagctgaagccaacgaaggtcagcaggaacaaggtgacaatcaataacaaaatgcggcgtaaggtgaagataatcatggttttttcacctcatcctgtttctcgcgatacaccccagcaaaggaggcgttaccaaacgggctaagtaccagacctttgatatcgtaccgataggcctgcaaacgcaaactgctcgccagcggcaaaatgggcaattcctgcgccagaatactctgcgcttcgtcataggcttcaatacgcgccgccagctgctggctagagagcgccttacgcaatacgctgtcgaatttcggatcgcaccagtgggcgaggttggtctggctatgaattgccgcgcagctcagtaacggacggaagaaactgtccgggtcgttactgtccgtcgcccaaccggataacgtcagatcatggctcatatccatcaaccgcgcctcctgaaagcgaccttctaccggcacaatcaccacttttacgccaacctgcgccatatccgcctgaatcagttcggcagttttcagtggactggggttccacgcctggctacgtgtgggcacccacagtttcagcgttaaattttccagccccaagctcttcaactgttcgcggcttttcgccggattgtattcagtaattttagcctcgttgtcataggcccagctggcgcgcggtaaaatagaggccgccgtttcagccgtaccataatagatggattgcatcaggcgctggttattaatcgccagtgccagcgcatggcggacagcgggattatttagcggcggtttggcggtgttaaatgccagataggcgacgttcatcccaggacgcagcgttaaacgcaagcgcgggtcgtcacgcaaaatggatagctggctggcagcaggccaggccagaacgtcgcattccccggtcaggagtttgctcagacgtccggtgccgccggagcctaaatccaccactacctgcggcattaacggtttaccgcgccagaagtcatcatgacgttgtaggcgaataaattgcccggcgcggtattcgctcaactgatacggaccggtgccgaccggttgacggtcgagttgctcctggcgatcttctttctctaacttccgggcatattctgcgctcatgacgctagcataatgggttgcgaggtgccacaaaaaagaagcatccggctgggcgagtcggaactcaacggtatgattatccagtttgcggacgcttttcacgttatcggcaaattgcaggctgtcgaagtaggggaagttgctgccgttgacgttatgccacgggttgttgcggtcaaaaattcgctggaaggtaaacaccacatcgtcggcattcattttacgagtgggagtaaaccagtcggttttttgaaacggaacatcgcgacgcaggtggaagcgataggtcgcgccgttgtcgagtacttcccagctttcggcaagttccggcatcaggcgataggtatagggatcgacatccagcagtcgatcataaaactgggcggcaagggtatcgacaattaacccactgctcgctttggatgggttaaaggtgttgacttgcccgctgacgcaatagacaaaaccgctgtcgcggatatcagcatgcgggggagattcaggcgcggcgattgcctgaccactcacaagtccagcaatcaccaaaagagagcttaatacctggcgcataatattaagggattttatgtaaagaggctatcttactaatatttaatgacatttgccattaccgtttgtgttcaggggtcgtaatgagggccgtgtggttggtcgttgaacaggtgacgtcgccatctgttcaacattcgtacccgtgatttctctataactataactcacagaacaacttagcgaggagcagagcggtacgatcgtgagaaacccattaaagcacgctgcagtgcgtgtcattgttagccagatgcggcgtgaacgctttatccggacaacgatactgaccgatcgtctgcaattaaatcattactcattaccccattgattcaaaaactctgcgatctcatcaatgcgtacgggattaatccccgcttcagcagccatttcatgttgggcttcttcgctgatctcttcattgttcatcaaacgggtgagcagtaactggaagtagtgggccagcggtgtgcgttcagcctctgcgacaggctctgcgcattcggtcgcgtactcatcggcaatatcaaaatattttagcgggatatcgtggttcattatttgcccctggggttaatgcgctaagcataagggcggatgatagcactcgtgatccgggtcatacatctttttatagttaatggcgcggcgcgttaccctcaggcaggataatgcgccgcgcatccgactattacgtttcactcaccggcgttctgtcaccatcatacaacggcactttgcgatagcggcggatcagataccataaatatgcgccgcctaagctagcccataccagaccgagtgtcagactcgtactctcgaggttaacccacagcacacccaccgtcagcgcgccaaccagcggcatcagcaaatagtggaagtgatccttccagcttttattcattcctttacgccgccagaaatgattaaacacgctcagattcacgaaggtaaacgccaccagagcaccgaagttaattaacgctgtggcggtaactaaatcgaagaacagcgcgctcaacgcgacaatcccgaccataatgacgttgagtgccggagtccgccattttgggtgcacatagccaaacacgcgctccggaaacacattgtcacgccccatcacatacagcagacggctcacgctggcatgactagccaggccagaggctaacgtgttcacaaacgtggtgcagaggaaaatgctctggaagagcttgccgccgacgtacagcgcaatttcaggcagtgcggcatccggatctttaaagcggctgatatcgggaaagaacagctgcataaagaagctcgccgcgataaagataacgccaccgtagaccgccgtcaggaagatggctttcgggatcacgcgtgcggcgtccggcgtctcttcgctaagcgtggtcaccgcatcgaaaccgaggaaggagaaacagacaatcgtcgccccggtaataatcgggatcaggtgcgcgttctcgctgataaacggctgaagactccagacggtgccaacgccttctcctttatgcagtccctgaactaccaggaagataaacaccaccatgatggagatttgcaccagtacaaacagggtattgaagttagcgaccaggttgacgctcttcagattcgcggcggttaaaatggcgacgaaggttaccacccacacccacggcggcacttccgggaagagggcggagagatagattttcgccaacaagacgttaatcatcggcaaaaagagataatccagcaggctactccagccgaccataaatccgacgtgcgggttaatgctcttttgcgcgtaggtataggcgctaccggcctccggaaactggcgaaccagtttgccgtagctgatagcggtaaacagcacacccgccagcgccagcaaataggacgccggaacgtgaccgtcgctaatgccggagacaataccaaaagtatcaaatacggtcatcggcgtgagataggccagacccatcatcaccacctgccacaatttcagactttttcgcagacgggttttgccgggttgcgcagcaatattcagtggactattaatagccataattgctgcctcccctgcgtaataaggtttgcggtcgtgtcgacctgaaatcaaacctgtttagcaagggaagcaaagggggcggagtccagtcagtagcaggaggggcgcatacgcagcctccctcgccatgcggggatttaatcatcggcatcatctcatttcctcgtcacagtcttaatcgttaacggaagcccgttgccgcccgcgctccataacgcgacatccgggaaatgtctggattaccagcaaatgtcaggcctggctccgctcaggccgatgaaacaaccccgcaaggggtattacgcgtttttcaacatccactcaatttctgtttctgtgatgaggcgctcaaactgcaacagctcatcatttttacaggcgtgatagacatggcagaagcgttcgcctaaatagcggcgcaggtgatcattctcgataaactcacccagggcatcgctctggcgaatcggaaagggtaagccttcctgttccagcccgttgccttcgacttcttcctgcaacggcagctcgttatcaaggccatgcaaaataccggcaaaaatcgctgccatcaccagatatgggttggcatcggcacccgccacgcgatattccacgcggtgattatgacggtcgccgcacggaatacgcagggcgacggtgcggttgttatggccccagctcgcctgcgtcggcacatacattcccggctggaagcggcgatagctgttcacgtttggtgccagcaacgccatgctgctcggcatcaggtcaatcatcccggcgagcatctttttcagcagcgggctatcttcgccttccgcgtcagaaagcacgttctcgccacgattattttgcatactgatatggatatgcattccgctgcccgcgtgctcttcatacggcttcgccataaaagtggcgtgcatcttatgcttttctgccatcagacgcaccaggcgttttagtgccagcgcatcatcgcaggcttccagcacgttatcagtatggtaaaggttgatttcaaactgacccgggctggcctcagcgaccgcgccatctgccggaatcagctgtaactgcgccagttcatcaatatcattgagcacgtcggcgaagtggttgaggttatcaacggagtaaacctggctttgtgtattgcggtcatcggtgccaggcgcgcagggcggttgcagatacccttcagcgtcgcgctggcgatccagtaaatagaactccagctctaccgctacgaccgggaacaatccgcgctggcgcagctgctgccacaggcggttaagaacgttccgcggctcaacgtcaaagggagcgccatcttcatcgaccatggtcaggagcatctgaccgataaactctggatcggcggcagaaggagttaaggaaccgagaacaggaacacaggtacgatccggctcgcccatttcctgacccagacctgcttcttctactacgttgcccagaatatccattgcaaatacgctggccgggaaataacaccctttctcgagcttcttcaggctactaacaggaatacgctttccacggaagcaaccatttaaatcggtaagtaaaacatcaacatattgcgtattcgggtagcgctccaggtagcgtttcacttcctgcgtaaaggcgctaccccgcctctcttcactctgctgaacaaagttctctacttcaacgatattggtttccatgattcttcgcctttggtttgttttccgctcgttatcaaagcgtaaaatataatgaccaccattcgaatctgtatgcaaactaaatgtttgtcaaatgttaaattgagtttgcaaaaatgaaaacccactgctagattgaaaaaatattgaacataaaggtcatttaaagcgcagtaatggcgataatttagtccactttgtgagattgagcatggaaaatataatgaacaatccggttatcggtgtcgtaatgtgcaggaacaggcttaagggtcatgcgacccagactctgcaagaaaagtacctgaatgccatcatccatgcaggcggcttgcctattgcgctaccacatgcgctggcggaaccgagtttacttgaacaacttttgccgaaactcgatggcatttatcttcctggtagtcccagcaatgtgcagccgcacctatatggtgaaaacggcgatgagcctgacgccgatcccgggcgtgatcttctgagcatggcgataattaatgccgcactcgaaaggcgcatccccattttcgccatctgccggggtttacaagaactggtggtggcaaccggtggtagcttgcatcgcaagctgtgcgaacagcctgaattgctggaacatcgggaagatcccgaactgccggtggaacagcaatatgcaccgagccatgaagttcaggttgaagaggggggattactgtctgcgttgttacctgaatgtagcaacttttgggtaaactctctacatggacaaggggcgaaggtcgttagcccacggttgcgtgttgaagctcgcagcccggatggcttagttgaggcggttagcgtcatcaatcatccttttgcgctgggcgtacagtggcacccggaatggaacagtagcgagtacgcgcttagccgtatattgttcgagggctttatcaccgcttgtcagcaccatatcgctgaaaaacagcgactctgaccactacagtttaaggaaatgcaaatatgagtgatgagggactggcgccaggaaaacgcttgagcgaaatccgccagcagcaggggcttagtcaacgtcgtgccgccgaactctccgggctgactcacagtgctatcagtacgatagaacaagataaagtcagccctgccatcagtacgctgcaaaagctgctgaaggtgtatggtctgagtctcagcgaattcttttccgagccggaaaaacctgatgagccgcaggtcgtcattaatcaggacgacttaattgagatgggtagtcagggtgtgagtatgaagctggttcataacggtaacccgaatcgcacgctggcgatgatctttgaaacgtaccagccgggcacaaccactggggaaagaattaagcatcagggtgaggaaataggcactgtactggaaggtgaaattgttctgacgattaatggtcaggattaccacctcgtcgcggggcaaagttatgccattaataccggcatcccgcacagtttcagtaatacgagcgcaggtatttgccgaattatcagcgcccatacgcccaccacgttttaatctttttgttctgtaagccgggtaagcgcaatgcgcccggcaatctatacacaaaatcattcaagttgcatcaaggcggcaagtgagcgaatcccgatgagcttactcaggtaagtgattcgggggagcgaacgcagccaaggcagaggcggcttgaaggatgaagtgtatataaagaatgtcgccagaaataaacgggcatacggcccggggatctctgcgccctgacgttcacaaactgcatatatctgatagacgtgaaacaggagtcataatgaattttcatcatctggcttactggcaggataaagcgttaagtctcgccattgaaaaccgcttatttattaacggtgaatatactgctgcggcggaaaatgaaacctttgaaaccgttgatccggtcacccaggcaccgctggcgaaaattgcccgcggcaagagcgtcgatatcgaccgtgcgatgagcgcagcacgcggcgtatttgaacgcggcgactggagtctctcttctccggctaaacgtaaagcggtactgaataaactcgccgatttaatggaagcccacgccgaagagctggcactgctggaaactctcgacaccggcaaaccgattcgtcacagtctgcgtgatgatattcccggcgcggcgcgcgccattcgctggtacgccgaagcgatcgacaaagtgtatggcgaagtggcgaccaccagtagccatgagctggcgatgatcgtgcgtgaaccggtcggcgtgattgccgccatcgtgccgtggaacttcccgctgttgctgacttgctggaaactcggcccggcgctggcggcgggaaacagcgtgattctaaaaccgtctgaaaaaagtccgctcagtgcgattcgtctcgcggggctggcgaaagaagcaggcttgccggatggtgtgttgaacgtggtgacgggttttggtcatgaagccgggcaggcgctgagccgtcataacgatatcgacgccattgcctttaccggtagtacccgtaccgggaaacagctgctgaaagatgcgggcgacagcaacatgaaacgcgtctggctggaagcgggcggcaaaagcgccaacatcgttttcgctgactgcccggatttgcaacaggcggcaagcgccaccgcagcaggcattttctacaaccagggacaggtgtgcatcgccggaacgcgcctgttgctggaagagagcatcgccgatgaattcttagccctgttaaaacagcaggcgcaaaactggcagccgggccatccacttgatcccgcaaccaccatgggcaccttaatcgactgcgcccacgccgacagcgtccatagctttattcgggaaggcgaaagcaaagggcaactgttgttggatggccgtaacgccgggctggctgccgccatcggcccgaccatctttgtggatgtggacccgaatgcgtccttaagtcgcgaagagattttcggtccggtgctggtggtcacgcgtttcacaagtgaagaacaggcgctacagcttgccaacgacagccagtacggccttggcgcggcggtatggacgcgcgacctctcccgcgcgcaccgcatgagccgacgcctgaaagccggttccgtcttcgtcaataactacaacgacggcgatatgaccgtgccgtttggcggctataagcagagcggcaacggtcgcgacaaatccctgcatgcccttgaaaaattcactgaactgaaaaccatctggataagcctggaggcctgaaatgaccgaacataccagcagttactacgccgccagtgcgaataaatatgcaccattcgacacgctgaatgagagtatcacctgcgacgtttgcgtggttggcggcggctataccgggctctcctccgcgctgcatctggcggaagcgggctttgacgtagtggttctcgaagccagtcgcatcggctttggcgcaagcgggcgcaatggcggacagcttgtgaactcctacagccgcgacatcgacgtgatcgaaaaaagctacggcatggacaccgcccgtatgctcggcagcatgatgttcgaaggtggtgagatcatccgcgaacgtatcaaacgttatcagattgactgcgactaccgccccggcggcctgtttgtggcgatgaatgataaacagctcgccacacttgaagagcagaaagagaactgggaacgctacggcaataaacagctggaattgctggacgccaacgccattcgccgtgaagtagccagcgatcgctataccggtgcgctgctggatcacagcggtgggcatattcatccgctaaaccttgccattggcgaagcggacgccatccgcctcaacggcgggcgcgtgtatgaactttctgccgtgacgcagatccagcacaccacgccagccgttgtgcgaactgccaaaggtcaggtgacggcgaagtatgtgattgtcgccgggaatgcgtatctgggcgataaagtagagccggaactggcgaaacgcagcatgccgtgcggcacgcaggtgatcaccaccgaacggctgagcgaagatttagcccgtagcctgatcccgaaaaactactgtgtggaagactgtaactatctgcttgattactaccgtcttaccgccgacaaccgcctgctgtacggcggcggcgtggtctacggcgcgcgcgacccggatgacgttgagcgccttgtggtgccgaaactgctgaaaaccttcccgcagctgaagggcgtgaaaattgattaccgctggacgggcaacttcctgctgaccctgagccgtatgccgcagtttggtcgcctcgataccaacatctattacatgcagggctacagcggccacggcgtgacctgtactcatctagccggacgtttgattgccgaactgctgcgcggcgacgccgaacgtttcgatgccttcgccaatctgccgcattacccgttccccggcgggcgcacgctgcgtgtgccgtttaccgcgatgggcgcggcgtattacagcctgcgcgatcgtctgggcgtttaatttccgattaaccgtgaagagtcaaaaggtgtgaaacatgagcaacaatgaattccatcagcgtcgtctttctgccactccgcgcggggttggcgtgatgtgtaacttcttcgcccagagcgctgaaaacgccacgctgaaggatgttgagggcaacgagtacatcgatttcgccgcaggcattgcggtgctgaataccggacatcgccaccctgatctggtcgcggcggtggagcagcaactgcaacagtttacccacaccgcgtatcagattgtgccgtatgaaagctacgtcaccctggcggagaaaatcaacgcccttgccccggtgagcgggcaggccaaaaccgcgttcttcaccaccggtgcggaagcggtggaaaacgcggtgaaaattgctcgcgcccataccggacgccctggcgtgattgcgtttagcggcggctttcacggtcgtacgtatatgaccatggcgctgaccggaaaagttgcgccgtacaaaatcggcttcggcccgttccctggtagcgtgtatcacgtaccttatccgagtgatttacacggcattagtacacaggactccctcgacgccatcgaacgcttgtttaaaagtgacatcgaagcgaagcaggtggcggcgattattttcgaaccggtgcagggcgagggcggtttcaacgttgcgccaaaagagctggttgccgctattcgccgcctgtgcgacgagcacggtattgtgatgattgctgatgaagtgcaaagcggctttgcgcgtaccggtaagctgtttgccatggatcattacgccgataagccggatttaatgacgatggcgaaaagcctcgcgggcgggatgccgcttagcggcgtggtcggtaacgcgaatattatggacgcacccgcgccgggcgggcttggcggcacctacgccggtaacccgctggcggtggctgccgcgcacgcggtgctcaacattatcgacaaagaaagtctctgcgaacgcgcgaatcaactgggccagcgtctcaaaaacacgttgattgatgccaaagaaagcgttccggccattgctgcggtacgcggcctggggagcatgattgcggtagagtttaacgatccgcaaacgggcgagccgagtgcggcgattgcacagaaaatccagcaacgcgcgctggcgcaggggctgctcctgctgacctgtggcgcatacggcaacgtgattcgcttcctgtatccgctgaccatcccggatgcgcaattcgatgcggcaatgaaaattttgcaggatgcgctgagcgattaatagcccaacgcaataatgtctgatgcgctgcgcttatcaggcctgcaaacgacgtattgattatgtatgccgaataaagcattcacgccgcatccggcaagttgtattgctcaacttcgttaaatctggtgctttttcaacaacgcgcggaactgatgataagttaaccccagtaattcagccgcgcgcttctggttatatttcccttgttgcaaactgagttgcagcaactctttttcctgctgcatctgaaactcacgtaaatccagcggcagtgttggaaggctggtggtttcactaacggcgatagcgtcttcaggcggacgccgtttaaagggatcaataatgatgtcatcaagcggataatcgctggtgccgtggcgatacacactacgttccaccacgtttttcaattcacgaatatttcccggccaacgataattcagcaatgtttctctggcgcgctccgtaaaccccgggaacagaggcagcttgatttcccgacacatctggatggcaaagtattctgccatcaacattatgtcgctttcgcgctcgcgcagtggtggcagttgtacaacatcaaaagccagtcggtcgagcaggtcagcgcgaaaagtgccttcattgaccatcgccgggagatcggcattcgtcgcgcataccaaccgcacattcacctgcaatggttggctgccgccaacgcgctccagttcaccgtactcaatcacgcgcaataatttctcctgcaccatcatcggtgccgtagcgagttcatcaagaaatagcgtaccgccgtcggcacgttcaaatctccctggatgacgtttttgcgcaccggtaaacgcccccgcttcgtgaccaaacagttcggaatccagcagattttcatttaacgccgcgcagttaagggaaataaacggcccttgccaacgggaggagagataatgcaggcggctggcaatcagctctttaccggtgccgcgttcgccgatgatgagcaccggtttgtccagcggtgcgagatggctaacctgttccagcacttcgagaaagctgttcgcctcaccaagtaaattatctttgtattctgccatgatgaaattcgccacttgttagtgtaattcgctaactcatcctggcatgttgctgttgattcttcaatcagatctttataaatcaaaaagataaaaaattggcacgcaaattgtattaacagttcagcaggacaatcctgaacgcagaaatcaagaggacaacattatgggtattttttctcgctttgccgacatcgtgaatgccaacatcaacgctctgttagagaaagcggaagatccacagaaactggttcgtctgatgatccaggagatggaagatacactggttgaagtacgttctactagcgcgcgcgcgttggcagaaaagaaacagctgactcgccgtattgaacaagcgagcgcgcgtgaggttgaatggcaggaaaaagccgaactggcgctgctgaaagagagagaggatctggcacgtgcagcgttaattgaaaaacagaaactgaccgatctgattaagtccctggaacatgaagtgacgctggtggacgatacgctggcacgcatgaagaaagagattggcgagctggaaaacaaattgagcgaaacacgcgctcgccagcaggcattgatgttacgtcatcaggcggcaaacagcagccgcgatgtgcgtcgtcagctggacagtggcaaactggatgaagcaatggctcgtttcgaatctttcgaacgtcgtattgaccagatggaagcggaagcagaaagccacagcttcggtaaacaaaaaagcctggacgatcagtttgccgaactgaaagccgatgatgcaatcagcgaacaactggcacaattaaaagccaaaatgaagcaagacaatcaataataacatccaggcggcgtccgaacgcgccgccgctcatcgtctaaggagtacttatgagcgcgctatttctggctattccgttaaccatttttgtgctgtttgttttaccgatctggttatggctgcattacagcaatcgttctggtcgcagtgaattgagccaaagtgagcagcagcgattagcgcaactggctgatgaagcaaaacggatgcgcgaacgtattcaggcgctggaatctattcttgatgcagaacatccgaactggagggatcgctaatggcgggcattaatctcaataaaaaattatggcgtattccacagcagggcatggtccgcggcgtctgcgccgggattgccaactattttgatgtaccggtaaaactggtgcgtatcctggtggtgctgagcattttcttcggtctggcgctgtttaccctggttgcttacatcattttgagttttgcgcttgatccaatgccggacaacatggcctttggtgagcagctaccttccagcagcgaattgctggatgaagtcgaccgtgaactggcggcaagtgaaacgcgtttacgcgagatggaacgttatgtcacttccgatactttcacgttacgtagccgtttccgtcaactgtgaggaaagttatgaatactcgctggcaacaggccgggcaaaaggtaaagcctggtttcaaattagcaggcaagctggtacttcttaccgcactgcgctatggcccggcgggtgtggcgggctgggcgataaaaagtgttgctcgccgaccgctgaaaatgttgctggctgtggcgctggaaccgctgttaagtcgggctgctaataaactggcacagcgttataaaaggtgaggggagtttcgcaaaaattgttaaatctcaggcgtataatggatggcaattttcatccatagaaggacgcttacatgtttaaaaaaggcttacttgctctggcactggtgtttagtctgcccgttttcgccgctgaacactggatcgatgttcgtgttccagagcagtatcagcaagagcacgttcagggggccatcaatattcccctgaaggaagtgaaagagcgcattgccaccgccgttccggataaaaacgacaccgtgaaagtgtattgcaatgccggacgccagagtgggcaagcaaaagagatccttagcgagatgggatatacccacgttgagaacgccggtggcctgaaagacatcgcaatgccgaaggtcaaaggttaaaagaattcaccatgagcggcgcttatgcgccgtttttttttctgtcacaccttatttacatccccatagattatttgcgtcagctcacaaatacgctttttccctggtaaaaaatgatttcctgcgtgactaaaacccttgtgctcaattgacagtttattttctgcggagtagtctctcgtttcatgggaccgctaccacggaaaggcaacatgaaacagaaaattacggattacctggacgaaatctacggtggaacatttaccgcaactcatttacagaaacttgtaacgcgtcttgagagtgcgaaacgattaattacacagcgacgtaaaaaacactgggatgaaagtgatgtcgtgttaattacctatgccgatcaatttcacagcaatgatttaaaaccattacccacatttaatcagttttaccatcaatggctgcaaagcatttttagtcatgttcatttgttgccgttttatccatggagttctgatgatggctttagcgtaattgattatcatcaggtcgccagtgaagcgggggagtggcaggatattcagcaactcggtgaatgcagtcatttaatgtttgattttgtctgcaaccatatgagcgcaaaaagtgaatggtttaaaaactatttacaacagcatccaggttttgaagatttttttattgccgttgacccgcaaaccgatctcagcgccgtcactcgcccgcgtgcgttaccgttattaacgccattccagatgcgcgatcatagtacgcgccatttatggaccacctttagtgacgatcaaattgacctgaattaccgtagccctgaagtgttgctggcgatggtggatgttttactctgttaccttgcgaaaggtgctgagtatgtccgcctggatgccgttggctttatgtggaaagagccgggaacaagctgcatccatctggaaaaaacacatctgattatcaaactgttacggagcattattgataacgttgcgccaggtacagtgatcattaccgagaccaatgttccgcataaagacaacattgcttactttggcgcaggcgatgacgaagcacatatggtgtaccagttcagcctgccgccactggtgctgcatgcggtgcaaaaacagaacgttgaggcgctttgtgcgtgggcgcaaaacctgacactaccttccagcaacaccacctggtttaacttcctcgcctctcacgatggcatcgggctaaacccgctacggggcttgttgcctgaaagcgaaatattagagctggtcgaggcgttacagcaggaaggtgcattagtaaactggaaaaataatcccgacggtacacgcagtccgtatgaaataaatgtgacctatatggatgcgttaagccgccgtgagagtagcgatgaagaacgttgcgccaggtttatccttgcccatgcgattttgttaagtttccccggtgtgccagcgatatatattcaaagtattcttggcagccgtaatgattacgcaggtgtcgaaaaactcggatataaccgtgcgattaaccgtaaaaaatatcacagtaaagagataacccgagaactgaacgatgaagctacattaaggcatgcggtatatcatgagttgagccgtttaattacacttcgtcgcagccataacgagtttcatccggataataattttaccattgatacgattaatagttccgtaatgcgtattccaagaagtaacgctgatggtaattgtctgactggattgtttaatgtcagtaaaaatattcagcatgtaaatattactaatctgcatggtcgggatctgattagtgaagttgatatattgggtaatgaaataacgctgcgcccctggcaggttatgtggattaaataaaaaggaacatctcatgattaaaagtaaaatcgtgctgttaagtgcactggttagttgcgccctgattagtggctgtaaagaagaaaataaaacgaatgtatccatcgaatttatgcattctagcgtggagcaggagcgccaggccgttatcagtaaattgattgcccgttttgaaaaagaaaaccctggcatcaccgttaagcaagtgcccgtggaagaagatgcctataacactaaagtcattactcttagtcgtagcggtagcctgccggaagtgatcgaaaccagccatgactacgccaaagtgatggacaaagagcagcttatcgatcgcaaagcggttgccacagtcatcagcaacgttggtgaaggcgcgttttacgatggcgtactgcgtattgtgcgtaccgaagatggtagcgcatggaccggtgttcctgtcagcgcctggattggcggtatctggtatcgcaaagatgtgctggcaaaagcggggcttgaggagccgaaaaactggcaacagctgctggacgttgcacagaaactgaatgacccggcgaataaaaaatacggcattgcgctgcctacagcagaaagcgtgttgacggaacaatccttctcccagtttgcgttatccaaccaggctaacgtctttaacgccgaaggcaaaatcacccttgatacaccagagatgatgcaggcactgacctattaccgcgaccttactgccaacactatgccgggttctaacgacatcatggaagtgaaagacgcctttatgaacggcaccgcgccgatggcgatttactccacctatatccttccggctgtgattaaagaaggcgacccgaaaaacgtcggtttcgtggtgccaaccgagaaaaactctgcggtctacggcatgttgaccagcctgaccattaccgccgggcaaaagaccgaagagacggaagcagcagaaaaatttgtcacctttatggagcaggcagacaacattgccgactgggtgatgatgagcccaggtgctgcgctgccggtgaataaagcggtggtgactaccgccacctggaaagacaacgacgttattaaggcgctgggtgaactaccgaatcagctaatcggtgaactgccaaatattcaggtttttggcgcagtaggggataaaaactttacccgcatgggtgatgtgacgggttctggcgtggtgagtagtatggtgcataacgtcaccgtgggtaaagccgatctctctactacgctgcaagcgagccagaaaaaactggatgaactgatcgaacagcactaaacccaggacaggaatccgcaatgaacaggctttttagtggtcgttccgatatgccctttgcgctgctgcttctcgcgcccagcttattactgctgggcggtctggtggcgtggccgatggtgagcaatatcgaaatcagttttttacgtctgccgctcaatcccaacatcgagagtacgtttgttggggtgagcaactatgtgcgtatcctctccgatcccggcttctggcatagcctgtggatgacggtctggtataccgcgctggtggtggcgggcagcaccgtgctcgggctggcggtggcgatgtttttcaaccgcgagttccgcctgcgcaaaaccgcgcgtagcctggtgatcctctcctacgtaacgccgtccattagcctggtgttcgcctggaaatacatgttcaacaacggctacggcattgttaactacctcggcgtcgatcttctgcatctctatgagcaggcaccgctgtggttcgataatccgggcagtagctttgtgctggtggtgctgttcgccatctggcgctacttcccgtatgcctttatcagctttctggcgattttgcagaccatcgacaaaagcctgtacgaagcggcagagatggatggcgctaatgcctggcaacggtttcgtatcgtcacgctgcccgcaattatgccggtcctggcgacggtggtgacactgcgcaccatctggatgttctacatgttcgcggatgtttatttgctgacgaccaaggtcgatattctcggtgtatatctctacaaaaccgcctttgcctttaatgatttaggaaaagcggcggcgatcagcgtggtgctcttcatcattattttcgctgtcattctgctgaccaggaaacgggtgaacctcaatggcaacaaataaacgcacactcagtcgcatcggtttttactgcgggctggcgctgtttctcatcatcacgctgtttccattttttgtgatgctgatgaccagcttcaagggcgcgaaagaggcgatcagtctgcatcctacgctgctgccgcagcagtggacgctggagcattacgtcgacatttttaacccgatgattttcccgtttgtcgactacttccgtaacagtctggtggtgtctgtggttagttccgtggtggcggtattcctcggcattcttggggcttacgcgctttcccgcctgcgctttaaaggtcggatgaccatcaacgccagcttttacacggtgtatatgttctctggcattttgctggtggtgccgcttttcaaaatcatcaccgcgcttggcatttacgacactgagatggcgctgatcatcaccatggtgacgcaaactctgcccaccgccgtgtttatgctgaaaagctacttcgacaccatccccgatgagatcgaagaagcggcgatgatggatggcctcaaccgtctgcaaattatcttccgcatcaccgtgccgttggcgatgtccgggctgatatccgtgttcgtctactgctttatggtggcgtggaacgactatctgtttgcgagcattttcctctccagcgccagcaatttcaccttaccggtgggcctgaacgcgctgttcagtacgccagattacatctggggacggatgatggcggccagtctggtgaccgcattgccggtggtgattatgtatgcgcttagcgaacgttttattaagagtggtttgaccgccggtggcgtgaagggctaaagcggccagtttctttacaaggagttttaaatgaaaaagttagtagccacagcaccgcgtgttgctgcgctggttgagtatgaagatcgggcgattttagctaatgaagtgaagatccgcgtgcgtttcggcgcaccgaaacacggaacggaagtggtcgacttccgcgccgccagcccgtttattgatgaagactttaacggcgaatggcagatgttcactccgcgtccggcagatgcgccgcgcggcattgagtttggcaaattccagcttggcaacatggtggttggcgacattatcgagtgcggcagcgacgttaccgactacgcggtgggcgacagcgtatgcggctacggcccgctctccgagacggtcatcattaacgcagtgaataactacaagctgcgcaaaatgccgcaaggcagctcctggaaaaacgccgtctgctacgacccggcgcagtttgccatgagcggcgtgcgcgatgccaacgtgcgcgtaggggattttgtggtggtggtagggcttggcgcaatcggtcaaattgccatccaactggctaaacgcgctggcgcttctgtggtgattggcgtcgatcctatcgcccatcgctgtgatattgcccgtcgccacggcgcggatttctgccttaaccccatcggcactgatgtaggtaaagagatcaaaacgctgaccggcaagcagggtgccgatgtgattatcgaaaccagcggctacgccgacgcgctgcaaagcgcgctccgcggtctggcttatggcggcaccatctcctatgtcgcgtttgccaagccgtttgccgaaggttttaacctcggacgcgaagcgcatttcaataacgccaaaattgtcttctctcgcgcgtgcagcgaaccgaacccggattatccgcgctggagccgcaagcgtattgaagaaacctgttgggaactgctgatgaacggttatctcaattgcgaagatttaatcgacccggtggtgacctttgccaatagcccggaaagctatatgcagtatgtcgaccagcatccggaacagagcatcaaaatgggcgttacgttttaattcaaaggaatgaaaaaaatgaaaatcggcacacagaatcaggcgttctttccggaaaacattctggagaaatttcgttatatcaaagagatgggcttcgatggttttgagattgacggcaaactgctggttaacaacatcgaagaagtcaaagcggcgatcaaagaaaccggtttaccggtgaccaccgcctgcggtggctatgacggatggattggcgactttatcgaagagcgtcgtcttaatggcttaaagcagatcgagcgcattctcgaagcgctggcagaagtgggcggtaaaggcatcgtcgttccggctgcgtggggcatgtttaccttccgcttaccgccgatgaccagcccgcgtagcctggacggcgaccgcaaaatggtgagtgattccctgcgcgtactggaacaggtcgccgcgcgtaccggaaccgtggtgtatctcgaaccgttaaaccgctatcaggatcatatgatcaacaccctcgccgatgcccgccgttacatcgtcgaaaacgatcttaaacatgtacagattatcggcgatttctatcacatgaatatcgaagaagataacctggcgcaggcgctgcatgacaaccgcgacctgctcggtcatgtgcatattgcggataaccatcgctaccagccgggcagcggcaccctggatttccacgcgctgtttgaacagctgcgcgcggataactatcagggctatgtagtgtacgaagggcgtatccgggcggaagatcctgcccaggcgtaccgtgatagcttggcctggttgcgtacctgctaagaggtctttgtgaaaagtgcaatgacaagctctccgctgcgggtcgcgataataggcgcaggccaggtggcggataaggttcatgctagctactactgcacccgcaacgatctggaactggtggctgtctgtgacagccgcctttcccaggcgcaggcgctggcagaaaaatacgggaatgcatccgtgtgggacgatccgcaggccatgctgctggcggtgaaacctgatgtggttagcgtctgcagtcctaaccgttttcattacgaacataccctgatggcactggaagcgggctgccatgtgatgtgcgaaaaaccgcccgccatgacgccagaacaggcgcgggaaatgtgcgataccgcgcgcaaactgggcaaggtgctggcctacgactttcaccatcgttttgcgctcgatacgcaacagctgcgtgaacaggtgaccaacggcgttttgggagagatttacgttaccaccgcccgcgccctgcgtcgctgcggcgttcccggctggggtgtctttaccaataaagaactgcagggtggtggcccgctgatcgacatcggcattcatatgctggatgctgcgatgtatgtgctgggctttccggcggtgaaaagcgtgaatgcgcatagctttcaaaagatcggcacgcaaaagagctgtggtcaatttggtgagtgggatccggcaacttacagcgtcgaagatagcctgtttggcaccattgaatttcataacggcggcattctgtggctggaaacgagttttgcactcaacatccgcgaacagagcattatgaacgtcagcttttgtggtgataaagctggtgcgacgctgtttccagcacatatctacaccgataacaacggtgaattaatgacgctgatgcaacgggaaatagcagacgacaaccgccatttgcgcagcatggaagcctttatcaatcacgtacagggcaagcccgtgatgatagccgacgccgagcaggggtacatcatccagcaactggtggcggcgttgtatcaatccgcagaaacagggacgcgtgtggaattatgaccaggccagtaacgttaagtgaaccccatttcagccagcataccctgaacaagtatgcaagcctgatggcgcaggggaacggctatcttgggcttcgcgccagccatgaagaagattacacgcgccagacgcgagggatgtatctggcggggctgtatcatcgggcgggaaaaggtgaaatcaacgaactggtgaacctgcctgatgtcgtggggatggagattgccataaatggtgaggttttcagcttatcccacgaagcctggcagcgtgagcttgactttgccagtggcgaattacgccgcaatgttgtctggcgtaccagcaacggcagtggttacaccatcgccagccgtcgctttgttagcgcagaccaactgccgctcattgcgctggaaatcactattacgccactggacgccgacgcgagtgtgctgattagtacaggcattgacgccacgcaaaccaatcacggtcgccaacatctcgacgaaacccaggtgcgggtgtttggtcagcatctgatgcaggggagctacaccacccaggatggacgcagtgatgtggccatcagctgttgctgtaaggtgagcggtgatgtgcagcaatgctataccgccaaagagcgccgtttactgcaacataccagtgcgcagcttcatgcaggcgagacaatgacgttgcaaaaactggtgtggatcgactggcgggatgacaggcaagctgctttagacgagtggggcagcgcgagccttcgccagcttgaaatgtgcgcgcagcagagttacgaccaacttcttgcagcaagtacagaaaactggcgtcaatggtggcagaaacgtcgtatcacggtaaatggcggcgaagcgcacgatcagcaagcgttagattatgcgctttatcatctgcgcatcatgacgcctgcccacgacgagcgcagcagcattgcggcaaaaggcttaaccggcgaaggctacaaaggccacgttttctgggatacagaagtatttttgttaccgtttcatctgtttagcgatccgacggttgcccgaagtttactgcgttatcgctggcacaacttgccaggcgcgcaggagaaagcgcgacgcaacggctggcagggcgcgctatttccgtgggaaagcgcgcgcagcggcgaagaagagacgccggaatttgccgccattaacattcgcaccgggctgcggcaaaaagtggccagcgcgcaggcggaacatcatctggtggccgatatcgcctgggcggttattcaatactggcagaccacgggggatgaaagtttcattgcgcatgaaggcatggcgctacttctggagacggcaaagttctggattagccgcgcggtgagagttaacgatcgtctggaaattcatgatgttattgggccagacgaatataccgaacatgtcaataataatgcatacaccagctatatggcccgctacaacgttcaacaggcgctgaatattgcccgccagttcggctgtagcgacgatgcgtttatccatcgcgccgaaatgttcctcaaagagctatggatgccagaaattcagcccgacggcgttttgccgcaggatgatagctttatggctaagccggcgattaatctggcgaaatacaaagcggcggcggggaagcaaaccatactgctggattatagtcgcgcagaagtgaacgagatgcagatcctcaaacaagctgatgtggtgatgctcaattacatgctgccggagcagttcagtgcggcaagctgtcttgccaatctgcaattttatgaaccgcgcactattcacgacagcagtttaagtaaagcaatccacggcattgttgccgcacgctgtggcctgctgacccaaagttatcagttctggcgcgaggggactgaaatcgatcttggtgctgatccgcatagttgtgatgatggtatccatgctgccgcaactggcgctatctggctgggggcgattcagggttttgccggggtgagcgtgcgtgacggtgaattgcatctcaatccggcgttacctgagcagtggcaacagttgtctttccctctgttctggcagggctgcgaattacaggtcactcttgacgcgcagcgtattgcgattcgaacttctgcgcccgttagtctgcgtttgaacggtcagcttataaccgtggctgaagaatctgttttctgtttgggtgattttattttgcccttcaatgggaccgctaccaaacatcaggaggatgaatgaaactgcaaggggtaattttcgatctggatggtgtaatcaccgataccgcgcatctgcatttccaggcgtggcagcagattgccgctgaaattggcatcagcattgatgcgcagtttaacgaatccctaaaagggatcagccgcgatgagtctctgcggcgcattctgcaacacgggggcaaagagggcgactttaacagccaggagagggcgcaactggcgtatcgcaaaaatctgctctatgtccacagtctacgcgagttgacggtcaacgctgttctacccggcattcgctctttgctggcagatctccgtgcacagcagatcagcgttgggctggcttctgtctccctgaatgcgccgacgattttagcggcgctggagctgcgcgagtttttcaccttctgcgcggatgcttcccaacttaaaaacagcaaaccggacccggaaatctttctcgccgcctgtgcagggctgggcgtgccgccgcaggcatgtatcggcattgaagatgcgcaggcgggcattgacgccattaacgccagcggtatgcgcagcgtggggatcggcgcgggcttaaccggggcgcaattactgttgcctagtacggaaagtctcacctggccgcggttaagcgccttctggcaaaacgtataacaaaggaatcaacatggctcagcttagcttacaacatattcaaaaaatctacgataaccaggtgcatgtggtgaaggacttcaacctggaaattgccgataaagagttcatcgtgtttgtcggcccgagcggctgcggtaagagcaccaccctgcgcatgattgccgggcttgaggagatcagcggcggcgatctgttgatcgacggcaaacgaatgaatgacgttccagccaaagcacgcaatatagcgatggtgttccagaactacgcgttgtatccgcatatgacggtttacgacaacatggcgtttggtctgaagatgcaaaaaatcgccaaagaggtgattgatgagcgggtgaactgggcggcgcaaattctcggcctgcgtgagtacctgaaacgtaagccgggggcgctttccggcgggcaacgtcagcgagtggcgcttgggcgggcgattgtacgcgaagcgggcgtgtttttaatggatgaaccgctctctaaccttgatgccaagctgcgcgtgcaaatgcgcgcagagatcagcaagctgcatcagaaactgaacaccaccatgatctacgtgacccacgatcagaccgaagcgatgaccatggcgacgcggattgtgattatgaaagacgggattgttcagcaagtaggtgcgccgaaaaccgtttataaccaacccgcgaatatgtttgtttccggatttattggaagtccagcgatgaattttattcgcggcacgatcgatggcgataaattcgttacggaaacgcttaaattaaccattcccgaagagaaattagcggttctgaaaacacaggaaagtttgcataagcccatcgtgatgggaatacgaccggaagatattcatccggacgcgcaagaggaaaataacatttccgccaaaattagcgtggcagaattaaccggtgcggaatttatgctctacaccacggttgggggcacgagttaaacggttgggggcacgagttagtggtccgtgctggtgcgttaaatgattatcatgcaggagaaaatatcactattcattttgatatgacgaaatgtcatttctttgatgcagaaacggaaatagcaattcgctaaatacagggggaaggcattcccccaggataatacaaggaacaataatgaaaaagttattaccctgtaccgcactggtgatgtgtgcgggaatggcctgcgcacaggccgaggaaaggaacgactggcactttaatatcggcgcgatgtacgaaatagaaaacgtcgagggttatggcgaagatatggatgggctggcggagcctagtgtctattttaatgccgccaacgggccgtggagaattgctctggcctattatcaggaagggccggtagattatagcgcgggtaaacgtggaacgtggtttgatcgcccggagctggaggtgcattatcagttcctcgaaaacgatgatttcagtttcggcctgaccggcggtttccgtaattatggttatcactacgttgatgaaccgggtaaagacacggcgaatatgcagcgctggaaaatcgcgccagactgggatgtgaaactgactgacgatttacgtttcaacggttggttgagcatgtataaatttgccaacgatctgaacactaccggttacgctgatacccgtgtcgaaacggaaacaggtctgcaatataccttcaacgaaacggttgccttgcgagtgaactattatctcgagcgcggcttcaatatggacgacagtcgcaataacggtgagttttccacgcaagaaattcgcgcctatttgccgctgacgctcggcaaccacagcgtgacgccgtatacgcgcattgggctggatcgctggagtaactgggactggcaggatgatattgaacgtgaaggccatgattttaaccgtgtaggtttattttacggttatgatttccagaacggactttccgttagcctggaatacgcgtttgagtggcaggatcacgacgaaggcgacagtgataaattccattatgcaggtgtcggcgtaaattacagcttctgataatgggctaaattgccggatgcggcgcgagtactttatccgatctataaatgtaggccggataagatgcgctagcatcgcatctggcattcaggcaaggtagctggtatttatttcagcgtcatatgcgtggcaacggtaatattctgtggactcggttttccagaaattaagcggaataataactcgcagctttgttgacctaactcctgcgtcggaacatcgatgccgcccggtgcaggcgttaaaataaaactcagcgtttcattgctataacccaccaccgctaactgctgcggaatagcaatatttttctctgctgccgcacgataaatgctcattaatttcaggctgtcagtggcaaacaccgcctcaggcaacggactctggcttaataattgccgtgctgcttttaatgcagtttcatgggtataaccgccatcaacaatccattcatcacgcactgcaatattatgcgcagccaggctctgcttataaccattaacgcgatcaacgctaacatggacatcaagcggagcatgcaggcaggcaatattttgatgcccactttcaattaatgcatcggtcaacgcaatgctgtcgccaaaattatcggtatcgacagaataaacatgggcatattgaccttcaactttgccaatcaccaccaccggaatatcatatttatcgagttgggcaaaaaaactctcatccgctgggctactgagcataataatgcctttaatcattttctgcttaattttgctttcgcatttttgcagatcttctgccggattgtggctcgtttgtaatatcacgtcgaaaccttcttcttcagctttggcggtgatggcatgcaaaacttcagagaaaaacggattacccgccgtagttttggtgctacgggtagaaatcaccataatggcatcaaaaccgctagaggtcagcgcgcgggccagcttgtttggctgatactgtaattcttcaatggcccgtaacactttttcgcgcgcttccggggagatattagtttgcttattcagcacgcgacttacggtggatttacttacgcctgcaaccctggcaatatcataaatagtaggggacataggtcaggaactccgtccgaacgtgaatgctgcacatcttatggagttcgccggtcgatgacaacacgggcagttgataatcaatggcctggcccccacattcatatccttacgaatgattttttttctggtcttcagagcagcacaggacagcaatgaagcgacttaaaaatgaactcaatgcgctggtgaatcggggtgtcgacagacatctgcgcctcgctgtaaccggacttagccgcagcggcaaaacagcgtttatcaccgcgatggttaatcagttgcttaatattcacgccggagcacgtttgccgctgttaagtgcggtgcgtgaagagcgcctgctgggcgtgaaacgcattccccagcgtgactttggcattccgcgcttcacctatgacgaagggctggcgcagttatatggcgatccacccgcctggccaacgccaacgcgcggcgtcagtgaaatccgcctggcgctacgttttaaaagcaatgatagcctgctacgccactttaaggatacctccacgctgtatctggaaattgtggattatcccggcgaatggttgctcgacctgccgatgctggcgcaggactatttaagctggagccgccagatgacgggcttactcaatggtcagcgcggagaatggagcgcgaaatggcgaatgatgagcgaagggctggacccgctagcgcctgccgacgaaaaccggctggcggacattgccgccgcgtggaccgattatctccaccactgtaaagagcaggggctgcactttattcagcctgggcgctttgtcttgccgggagatatggcaggtgcgcccgcgctgcaattcttcccgtggccggatgtcgatacctggggcgagtccaaactggcgcaggccgataagcataccaatgccggaatgctgcgcgagcgctttaattattactgcgagaaggtggtgaaggggttctataagaatcattttctgcgctttgaccgccagattgtgctggtggattgcctgcaacctctcaacagtgggccacaggcatttaatgatatgcgtctggcactgacgcagctgatgcaaagttttcactacgggcagcgtaccctgttccggcgtttgtttagcccggttatcgataagctattgtttgctgccactaaagcggaccatgtgaccatcgatcagcacgctaatatggttagtttactgcaacaactgattcaggatgcctggcaaaatgcggcgttcgaagggatcagcatggactgcctggggctggcgagtgttcaggcgaccaccagcggcattattgatgttaacggtgagaaaatcccggcgctgcgtggtaatcgacttagcgatggcgcaccgctcactgtttatcctggcgaagttcccgcacgtttgcctggtcaggcgttctgggataagcaaggcttccagtttgaggcatttcgtccgcaggtgatggatgtcgacaaaccactaccgcatattcgtcttgatgctgcgctggaatttttaataggagataaattgcgatgaccgaaccgttaaaaccacgtattgatttcgacggtcctctggaggtcgatcagaatcctaaattcagggcgcagcagacctttgacgaaaatcaggcgcaaaattttgccccggccacgctcgacgaagcgcaggaagaagaggggcaagtcgaagcggtaatggacgcagcgttacgtccgaaacgcagcctgtggcgcaaaatggtgatgggagggctggctctgtttggcgcaagcgttgtcgggcagggtgtacagtggacaatgaatgcctggcaaacccaggactgggtggcgctgggtggatgtgccgctggggcattgattatcggcgctggcgtaggttctgtggtaacagagtggcggcgcttatggcgcttgcgacagcgcgcccatgaacgcgacgaagcgcgtgatttattgcatagccacggcacgggcaaaggccgcgcattttgcgaaaaactggcgcagcaggcgggtattgatcagagccatccggcgctgcaacgctggtatgccagtatccatgaaacgcaaaacgaccgtgaagtggtcagcctgtatgcgcatttggtccagccagttttagatgcccaggcgcggcgcgaaatcagccgtagcgcggcggaaagtacgttgatgattgcggtcagcccgctggcgttggtcgatatggcgtttatcgcctggcgcaatctgcgtttaattaatcgcatcgccacgctgtatggcattgaactggggtattacagccgtttgcgtctgtttaagctggtattgctgaatatcgcttttgccggagccagcgaactggtgcgcgaagtggggatggactggatgagccaagatctcgctgctcgtttgtctacccgcgcagctcaggggattggtgcaggacttctgacggcacgactcgggattaaagctatggagctttgccgcccgctgccgtggattgacgatgacaaacctcgcctcggggatttccgtcgtcagcttatcggtcaggtgaaagaaacgctgcaaaaaggcaaaacgcccagcgaaaaataatgcaatatcgggtgctgaccggatatctttacgccgaagtgcccgtttttccgtctttgtgtcaatgattgttgacagaaaccttcctgctatccaaatagtgtcatatcatcatattaattgttcttttttcaggtgaaggttcccatgcgtctggaagtcttttgtgaagaccgactcggtctgacccgcgaattactcgatctactcgtgctaagaggcattgatttacgcggtattgagattgatcccattgggcgaatctacctcaattttgctgaactggagtttgagagtttcagcagtctgatggccgaaatacgccgtattgcgggtgttaccgatgtgcgtactgtcccgtggatgccttccgaacgtgagcatctggcgttgagcgcgttactggaggcgttgcctgaacctgtgctctctgtcgatatgaaaagcaaagtggatatggcgaacccggcgagctgtcagctttttgggcaaaaattggatcgcctgcgcaaccataccgccgcacaattgattaacggctttaattttttacgttggctggaaagcgaaccgcaagatagccataacgagcatgtcgttattaatgggcagaatttcctgatggagattacgcctgtttatcttcaggatgaaaatgatcaacacgtcctgaccggtgcggtggtgatgttgcgaagtacgattcgtatgggccgccagttgcaaaatgtcgccgcccaggacgtcagcgccttcagtcaaattgtcgccgtcagcccgaaaatgaagcatgttgtcgaacaggcgcagaaactggcgatgctaagcgcgccgctgctgattacgggtgacacaggtacaggtaaagatctctttgcctacgcctgccatcaggcaagccccagagcgggcaaaccttacctggcgctgaactgtgcgtctataccggaagatgcggtcgagagtgaactgtttggtcatgctccggaagggaagaaaggattctttgagcaggcgaacggtggtagcgtgctgttggatgaaataggggaaatgagtccacggatgcaggcgaaattactgcgtttccttaatgatggcactttccgtcgggttggcgaagaccatgaggtgcatgtcgatgtgcgggtgatttgcgctacgcagaagaatctggtcgaactggtgcaaaaaggcatgttccgtgaagatctctattatcgtctgaacgtgttgacgctcaatctgccgccgctacgtgactgtccgcaggacatcatgccgttaactgagctgttcgtcgcccgctttgccgacgagcagggcgtgccgcgtccgaaactggccgctgacctgaatactgtacttacgcgttatgcgtggccgggaaatgtgcggcagttaaagaacgctatctatcgcgcactgacacaactggacggttatgagctgcgtccacaggatattttgttgccggattatgacgccgcaacggtagccgtgggcgaagatgcgatggaaggtagcctggacgaaatcaccagccgttttgaacgcagcgtattaacccagctttatcgcaattatcccagcacgcgcaaactggcaaaacgtctcggcgttagtcataccgcgattgccaataagttgcgggaatatggtctgagtcagaagaagaacgaagagtaagcgcgaatatgcctgatggtgcaacaccatcaggcatattaaattatgctttcagtacagccagagctgcttcgtaatccggctcggtggtgatttcatccaccagctggctgaaaatcacattgtcattttcgtcaataaccacaacggcacgcgctgccagacctttcagtgggccatcagcaattgccacaccgtaagcttgcagaaattcagcgttacggaaagtggagagggtgataacgttgttcagaccttctgcgccgcagaaacgagactgggcgaacggcagatcggcagagatacacagcacaacggtgttgtcgatctcagttgccagttggttaaacttacgtacacttgcggcgcaaacaccggtatcaatactcgggaaaatgttcagcactttgcgtttacccgcaaactgaccgagggtgacgtcagacagatcttttgccacgagagtaaaagtctgcgctttgctacccgcctgcgggatggaattggcgactgtaaccgggttgccctggaaatgaacggtttgactcatgattatctttcctgtttacatatagttaacgtcacacctagtttatgctaactgtcaataacacagcaaacgctattacagggtctccttacaacaactgtcaacgcagtttgtaattaaaagattaacccatatctggtgaatgaaacagtgatgaaccttctgccagatcaataaatcagaaaaatttaatgatatgacagaaggatagtgagttatgcggaaaaatcaggcaacgttacgcgtatgaccagcaagctgggccagcgcatcgttattttcgatggtgatgtatttacctttgactgccagcatgccgcttttctggaagcgacccagcagacggctgatggtttctaccgtcaggcccagatagttaccgatatcgccacgagtcatcgtcaggcggaattcacgaggggagaagccgcgttgggcaaaacgacgggacaggttgtagatgaatgcagccagacgttcctcggcatttttcttgctcaacagcaggatcatgtcctgatcgcctttgatttcaccgctcatcagacgcatcatctgctgacgcagattcggcattttaccggacaaatcgtccagcgtttcgaacgggatttcacataccatgctggtttccagcgcctgcgcgaagctcgggtgatggccgctgccgatggcgtcaaatcccaccaggtcgcctgctaaatggaaaccagtgatttgctcgtcgccttgctcagtgatggtataacttttaatcgtaccggagcggatggcataaaggcttttaagttcatcaccagccttaaacagcgtctggcctttctgaataggcttcttccgctcaatgatattatcaagctgatcaagctcatgttcgttgagtgtgaacgggatgcaaagctggctgatgctgcaatcctggcaatggatagcacaaccgccagactgaatgcgccgtataattcgcttttccgggatcataggtctgctcaagccgtaattgatatttgtcaattttaacatctttttagggagcaagtaagtctaagcaaaccttaacagcagagaattccgatattagatgtaaatatatgtctatctatttgaaaacccttaagttgttaagggtaactttacataaaagtgtgaacaagctggcacaaattgtttaatgtttacagcaaaagataaccttcatggcgcaataaccactcttttcgctgaactccgcctgcatatccggtcatggtgccgtttcggccaataacccgatggcaaggtacgacgatgctgatgggattgcttccgtttgccgcaccaacggcacgcgccgcgccaggacggcccaattgctcagccagttggccgtaatgcattacctgcccgcaggggatagtgcgtagtgttttccagacttcgcgctgaaatggcgtcccccccgtagcagtgggaagcgtatcaataatgctaagattaccggcaaaatattcacgaagcttgtcgcttaaaccgcctggattggtggcagaaatgcgctcatagccttctttgcgataatggatgtccagcagctgcaccatgcgttcgctgtactcttcccattcaaccgcccgcaggcgaaattgctcatcgcaaatcacccacagtggacccagtggcgtggcaattttttcttcaagtaatctcagcatccgttctctcttaagacaaacgtgggtaaatacccggacctatcggcagaccgacaagataccacgccagcacatcgcagccatactatgcagaaacaatgctgtcgatggctgcttttgcgtcagactgtgctttcgctgccatttccggaccgtatgcgatcccttcggcgaagacaaatttcacatcggtaatgccgataaagccgaggaacgtggacagatacggcgtcaccaggtccgttggtccatctttgtggatcccgccgcggctggtaataacgatggcttttttacccgttaccagaccttccggaccgttctcggtatagcggaaagtaacgcctgcgcgggcaaccaggtcaaaatagtttttcaactgagtcgagatgttgaagttatacatcggtgccgcaataacgataacgtcgtgggctttcagctcggcaatcaactcatcggaaagtgccagagcttcctgctgacgcggagtcagcggcgcatcgctcggacgcagagcgccaaccagttcgccatccagtaccggaatcggatttgcagccaggtcgcgaacggtgatttcatcagcggagtgcttttcgcgccattgttcaacaaaataatcggacaactgattagactgagagtaccctgccaggatgctggatttaagaactaataccttgctcatggtgtttccttatagatgtttgaatgggcgatgccccgttgcttgttgacactttattcacaatcctgccacagagatagcgcaataaatcgaagcctatgttcgaatttattgaacaacgcatagaaagccgcgatgtggtactctatatctatcatttaaaagaaaattaatcaggcagactactgcccactaacgttatgacagaacaacaaaaattgacctttacggccttgcagcagcggctggattcgctgatgctgcgtgacagactgcgtttttctcgccgtctgcacggcgtgaagaaggttaaaaatcctgatgcacaacaggccattttccaggagatggcgaaagagattgaccaggcggcagggaaagtcctgctgcgtgaagcggcacgaccggaaattacttatcctgacaatttaccggttagtcagaaaaaacaggacattctcgaagcgattcgtgatcaccaggtggtgatcgtcgccggggaaacgggttctggtaaaacgactcagttaccgaaaatctgtatggagctggggcgcgggattaaaggactgatcggccatacccagccgcgtcgtctggcggcaagaacagtggcgaaccgtattgcggaagagctgaaaacggagccgggcggttgcatcggttacaaagtgcgtttcagcgatcacgtaagtgataacacgatggtcaagctgatgaccgacggtatcctgctggcggagatccagcaagaccgcctgctgatgcagtacgacactatcattattgacgaagcgcacgaacgcagcctgaatatcgattttttgctcggctatttgaaagagttgctgccgcggcgtcctgacctaaaaatcattatcacttccgcgactatcgacccggaacgctttagccgccactttaataatgcgccgattattgaagtctccggtcggacctatccggtggaagtgcgctatcgcccgattgttgaagaagccgatgacaccgagcgcgatcagttgcaggcgatttttgacgccgtagacgaactgagtcaggaaagccatggcgacattctgatctttatgagcggcgagcgggaaatccgcgataccgccgatgcgctgaacaagctgaacttacgccataccgaaatcttgccgctttatgcgcggcttagcaacagcgaacaaaatagggtattccagagccacagcggacggcgcattgtgctggcgaccaacgtcgcggaaacgagcctgaccgtaccggggattaaatacgttatcgaccccggtacagcgcgtatcagccgctacagctatcgcaccaaagtgcagcgtttgccgattgagccgatttcccaggcgtctgccaatcagcgtaaaggccgctgtggtcgtgtgtccgaagggatctgtattcgtctctattccgaagacgatttcctcagccgcccggagtttaccgatccggagattctgcgtaccaacctggccagcgttattttgcagatgaccgcgctggggctgggcgatatcgctgcgttcccgtttgtcgaagcaccggataaacgcaatatccaggatggcgtgcgtctgctcgaagagctgggcgcgatcaccactgatgaacaggccagcgcctataaactgacgccgctcggtcgccagctcagccagttgcctgtcgacccacgtctggcgcgtatggtgctggaagcgcaaaaacatggctgcgtgcgtgaggcgatgattatcacgtccgcgctctccattcaggatccgcgcgaacgtccgatggacaaacagcaggcaagcgacgaaaaacatcgtcgcttccacgacaaagagtctgactttctcgcgtttgtgaatctgtggaattatcttggcgagcagcaaaaggcgctttcttccaacgccttccgtcgcctgtgtcgtaccgattatctcaactatctgcgcgtgcgcgaatggcaggatatctacacccagttgcgtcaggtggtgaaagaacttggcattccggttaacagcgaaccggcggagtatcgcgaaattcacattgcgttgctgaccggtttactttcccatatcggcatgaaagatgccgataaacaagaatataccggcgcacgtaacgcgcgtttctccatcttccccggttctggtttattcaaaaaaccgcctaaatgggtaatggtggcggaactggtagaaaccagccgcctgtgggggcgcattgctgcgcgtatcgacccggaatgggtggagccagttgctcagcatttgattaaacgcacctacagcgaaccgcactgggaacgggcgcagggcgcggtgatggcaacggaaaaagtcactgtttatggtttgccgattgttgccgcgcgcaaggtcaactacagccagatcgatccggcgttatgtcgtgaactctttattcgccacgcgctggtggaaggtgactggcagacgcgtcacgcattcttccgtgaaaacctgaaactacgggcggaagtagaagagctggaacacaaaagtcgtcgccgcgatattctggttgatgacgaaacgttgtttgagttctacgaccagcgcatcagccacgatgtaatctccgctcgccacttcgacagctggtggaaaaaagtcagccgcgaaacgcctgatttgctcaactttgaaaaaagcatgttgatcaaagagggcgcagaaaaaatcagcaagctggattacccgaacttctggcatcagggcaatctcaagctgcgtttgagctatcagtttgagcccggcgcggatgctgacggtgtgaccgtacatattccgctgccgttacttaaccaggttgaggaaagcgggtttgaatggcagatccccggtctgcgccgcgaactggtgattgctctgattaaaagcttgccgaaaccggtacgccgtaattttgtacccgcgccaaactatgccgaagcgtttttaggccgcgtcaaaccgctggagttaccgttgctcgacagccttgagcgcgagttacggcggatgaccggcgttaccgttgaccgcgaagactggcactgggatcaggtgcccgatcacctgaaaattaccttccgcgtggtggatgacaaaaacaagaagctaaaagaagggcgcagcctacaagatctgaaagatgcgctgaaaggcaaagtgcaggaaacgctatctgcggtggcggatgacggtatcgagcagagcggcttacatatctggagttttggtcagctgccggaaagctacgaacagaagcgtggcaactacaaagtgaaggcgtggccggcgctggtggatgagcgcgacagtgtggcgatcaaactgtttgataacccgctggagcaaaagcaggcaatgtggaacggtcttcgccgtctactgctgctgaatattccaagcccaatcaaatatttacatgaaaagttaccgaacaaagccaagctgggactgtactttaacccgtatggcaaagtgctggagctgatcgacgactgtatctcctgcggtgtggataaattgatcgacgccaatggtggcccggtctggacggaagaaggctttgctgcgctgcatgaaaaagtgcgtgccgaactgaacgacacggtggtggatattgcgaagcaggtcgagcaaatccttacggcagtgttcaatatcaacaaacgtctgaaagggcgggtggatatgaccatggcgctggggctttctgacattaaagcgcagatgggcgggttggtatatcgcggttttgtcactggtaacggcttcaaacggctgggcgacacgctgcgatatttgcaggcgattgaaaaacggctggaaaaactggcggttgatccacatcgcgaccgtgcgcagatgctgaaagtcgaaaacgtccagcaggcgtggcagcaatggatcaacaaactgccgcccgcacgtcgtgaggatgaagacgtgaaagagatccgttggatgatagaagagttgcgcgttagttacttcgctcaacaacttggtacgccttatccgattagtgataagcgtattttgcaggcgatggagcagattagcggttaaccctgctatttgcctgataaagaaaaaacccggtaagcatttagcgccgggttttttattaattctaaaacggtaagggtaaaaattcaggaattcagaaaaatacaattctctgctgcaagatgaataatgtttatctacagcatttccttaaaagatatgtcaggcttgcggagtggcggttaaggacatacgatttcctcctttcagagtgctccgcttctcactattatctcacgcagtattcttaagggaacgataaggaggaaccatgaacattaccccgtttccgacgcttagcccggcaactatagatgccataaatgttatcggacagtggctggcgcaggatgatttctccggtgaggtgccgtatcaggccgattgcgtgatccttgcaggcaatgcggttatgccgactatcgatgcggcatgtaagattgcccgcgatcagcaaattcctttactgattagtggtggtatcggtcacagcacaacttttttgtatagcgccatcgcacagcatccgcactacaacactatccgcaccactggcagagcagaagcgaccatcctggcggatatcgctcatcagttctggcacattccgcatgaaaaaatctggattgaagaccagagtacaaactgcggtgaaaacgcacgctttagcatcgcgctattgaatcaggccgtagaacgagttcatacggctatcgttgttcaggaccccaccatgcagcggcgcacgatggcgacgttccgccgtatgactggggacaatcccgatgcaccacgctggttaagttatcccggattcgttcctcagttaggaaataacgcagacagtgtaatctttattaatcagttacaaggattatggccagttgagcgttatctcagtctactcactggcgagctgccgcgtttacgcgatgatagcgatggctacggtccccgcgggcgagattttatcgttcacgttgattttccggcagaagtcatccatgcatggcaaacgctgaaacatgatgcggtgctcatcgaggcgatggaaagtcgcagcttacgttaaaaattgcccgtttgtgaaccacttgtttgcaaacgggcatgactcctgacttttatttctgccttttattccttttacacttgtttttatgaagcccttcacagaattgtcctttcacgattccgtctctctgatgattgatgttaattaacaatgtattcaccgaaaacaaacatataaatcacaggagtcgcccatgagtgtacccgttcaacatcctatgtatatcgatggacagtttgttacctggcgtggagacgcatggattgatgtggtaaaccctgctacagaggctgtcatttcccgcatacccgatggtcaggccgaggatgcccgtaaggcaatcgatgcagcagaacgtgcacaaccagaatgggaagcgttgcctgctattgaacgcgccagttggttgcgcaaaatctccgccgggatccgcgaacgcgccagtgaaatcagtgcgctgattgttgaagaagggggcaagatccagcagctggctgaagtcgaagtggcttttactgccgactatatcgattacatggcggagtgggcacggcgttacgagggcgagattattcaaagcgatcgtccaggagaaaatattcttttgtttaaacgtgcgcttggtgtgactaccggcattctgccgtggaacttcccgttcttcctcattgcccgcaaaatggctcccgctcttttgaccggtaataccatcgtcattaaacctagtgaatttacgccaaacaatgcgattgcattcgccaaaatcgtcgatgaaataggccttccgcgcggcgtgtttaaccttgtactggggcgtggtgaaaccgttgggcaagaactggcgggtaacccaaaggtcgcaatggtcagtatgacaggcagcgtctctgcaggtgagaagatcatggcgactgcggcgaaaaacatcaccaaagtgtgtctggaattggggggtaaagcaccagctatcgtaatggacgatgccgatcttgaactggcagtcaaagccatcgttgatagtcgcgtcattaatagtgggcaagtgtgtaactgtgcagaacgtgtttatgtacagaaaggcatttatgatcagttcgtcaatcggctgggtgaagcgatgcaggcggttcaatttggtaaccccgctgaacgcaacgacattgcgatggggccgttgattaacgccgcggcgctggaaagggtcgagcaaaaagtggcgcgcgcagtagaagaaggggcgagagtggcgttcggtggcaaagcggtagaggggaaaggatattattatccgccgacattgctgctggatgttcgccaggaaatgagcattatgcatgaggaaacctttggcccggtgctgccagttgtcgcatttgacacgctggaagatgctatcagtatggctaatgacagtgattacggcctgaccagtagtatctatacccaaaatctgaacgtcgcgatgaaagccattaaagggctgaagtttggtgaaacttacatcaaccgtgaaaacttcgaagctatgcaaggcttccacgccggatggcgtaaatccggtattggcggcgcagatggtaaacatggcttgcatgaatatctgcagacccaggtggtttatttacagtcttaatgagtgaaagaggcggaggttttttcctccgcctgtgcgcgtcagagtttagcgaatttttcgagggtgcgaataagctgtgtgacgaagccatattcgttatcgtaccaggcgaccgttttcaccagttgtaaatcgcccacggcggtaatttccgtttgcgtggcatcaaacaccgaaccgaaatggctgccaatgatatcggaagagactatttcttcatcggtataaccaaatgactcgttattggtggttgcttgtttaagtgcgttattcacctcttcggcagtcacttttttccgagaatcgataccagttcagtgaccgaacctgttttcaccggcacgcgttgcgcatgacctttcagtttgccgctcagttccgggatcaccagaccaatggcttttgccgcccccgtagtgtggggaatgatattttctgccgctgcgcgtgaagcacgtaaatctttaccacgcgggccatccaccagtgactgggtgccagtataggcatgaatggtcgtcatcgtgccgacttctatcccgaaactgtcatgcaaggctttggccatcggcgcaagacagttagtggtgcatgacgccacggaaacaatggtgtcgttgccatccagagtgtcgtcattgacgttataaacgatagttttcatttcaccggcaggggcggaaatcaacaccttcttcgcaccagcatcaagatgcgcctgcgatttctcggcggaggtataaaagccagtacattcgacaatgatttctgcacctttcgctttccacggaatatttttagcctctttttcggcgtaaaccgcgatacttttcccatcaacgataagtgaatcttccgtaaaatcaacgctccaggggaatggtccgtagtttgaatcatgtttcagcaggtaggcgagaatttatggggaagtgagatcattaatagcgacaacgtctatgttgcttttgacttcaagtaatcgacccaacaccagtcgaccgatacgaccaaaaccgttaataccaactttactcatggttttctcctgtcaggaacgttcggatgaaaattgatcctttccaagcttagaccaggatggcgggatgggcaatctccattctcacagtgaaacgtaacgtactgaaaacgggtgaacaatatttaatgaaattttgagaaaagcccgttatgttaacggaaaattatgttaaagcaggaaatgttatggaaaataaatatagtaggttacaaatcagcattcactggctggtctttttactggttatcgcagcgtattgcgcaatggagtttcgtggtttcttcccacgtagcgatcggccactcatcaacatgattcatgtttcctgtggcatcagtattctcgtgctgatggtcgttcgtcttttgttaaggctgaaatacccaaccccgccgattatacctaagccaaaaccgatgatgacgggactggcgcatttgggacatttggtgatttatctcctgtttattgcgctgccagtgattggtttggtgatgatgtataaccggggcaacccgtggtttgcgtttggtttgacgatgccttacgctagtgaggccaatttcgaacgggtagatagcttaaagagctggcatgaaacgctggcgaatctgggatattttgtcatcgggttgcacgctgcggctgcactggcacaccactatttctggaaggacaacacacttctacgcatgatgccgcgtaaacgttcctgaaggatatttaaagaaaacgcctgtactaaaaccgacccgtggtacaggcgaagaatacgggtctacatcggaagcgcctattatatttatttgtatgataaataaaaccataatccttgcccatacgtccatctggcttatttttaatcaattcacccgatctttgatctcatcaacggtatcaaaataaaccagcgtataacgttcaaatcgaacataagattcgataaaccatggaggttatatgaaaaaactggcacttattttgtttatgggaacgcttgtttccttttatgccgatgccgggcgcaaaccctgttctggtagcaaaggggggatcagtcactgtacggcaggcggcaaatttgtctgtaatgatggttctattagtgcaagcaaaaaaacatgcactaactgaagtgtaaaaggggtgccatgagaaaatgaatctgctagtcaaatgcgcggggaaaatccccgcgcttgcccttacctggacgtgcaggccatgagcgcagcaacctccttatcaccgtcccggaaccgcagttcgtagagcgtttgtcgggtcaggagtgtgaatgtcagaatcgtaatgcagataatgagcagacacaccaccagagggttgtgcttcatagcctttctccttgccggatggcgggtaagaggctaagatctgaattgctaggttcattcgttggcctcggttgatagaaatatcggtcggggccttcgtctttctgattcccggttagcctgaaaacagaaagtctcaggcacccgcaggcatcctatgaggtttccttagggacgaaaataatcacttcacgaaattgcgtgctgttttccagaatttttcgtcattcgggttagccagtttagccattcgttactctcttcattccaatagcattaattttctatgcaataattgttgtaaaaatgtgacgcaaagaggtttttggtcataagtaattaccgtcaagtgccgatgactttctatcaggagtaaacctggacgagagacaacggtaatgaatacaactcccagtcagcgattaggttttttgcatcacatcaggttggttccgttatttgcctgcattctaggcggtatcttagttctattcgcattaagtagtgccctggctggctatttcctctggcaggccgatcgcgatcagcgtgatgttactgcggagattgagattcggaccgggttagcgaacagtagtgattttttgcgtagtgcccggatcaatatgattcaggccggggctgcgagtcgtattgcggaaatggaagcaatgaagcgaaatattgcgcaagccgaaagcgagattaaacagagccagcaaggttatcgtgcttatcagaatcgaccggtgaaaacacctgctgatgaagccctcgacactgaattaaatcaacgctttcaggcttatatcacgggtatgcaacctatgttgaaatatgccaaaaatggcatgtttgaagcgattatcaatcatgaaagtgagcagatccgaccgctggataatgcttataccgatattttgaacaaagccgttaagatacgtagcaccagagccaaccaactggcggaactggcccatcagcgcacccgcctgggtgggatgttcatgattggcgcgtttgtgcttgccctggtcatgacgctgataacatttatggtgctacgtcggatcgtcattcgtccactgcaacatgccgcacaacggattgaaaaaatcgccagtggcgatctgacgatgaatgatgaaccggcgggtcgtaatgaaatcggtcgcttaagtcgtcatttacagcaaatgcagcatagtctggggatgacagtagggactgttcgacagggcgcggaagagatttatcgtggcaccagcgaaattagtgctggcaatgcggacctgagttctcgcaccgaagaacaagcggcggctatcgaacaaactgccgccagcatggagcaactcactgcgacggtgaaacagaatgcggataacgcgcatcatgccagcaaactggcgcaagaggcttctattaaagccagcgatggcgggcagacggtttccggtgtagtaaaaacgatgggcgctatctccacgagtagcaagaaaatttctgagatcaccgccgtcatcaacagtattgctttccagacgaatattctggcactgaatgctgccgttgaagccgcgcgagcgggtgagcaagggcgtggatttgccgttgtcgccagcgaagtacggacactcgcaagtcgcagcgctcaggcggcgaaagagattgaaggcttgatcagtgaaagtgtcaggttaattgacctggggagcgatgaggtggcaacggccgggaaaaccatgagcactattgttgatgccgtcgcgagtgtcacacatatcatgcaggaaatcgccgccgccagcgatgaacaaagtagaggcataacgcaggttagccaggcgatttctgaaatggataaggtgacgcaacagaatgcttctctggtagaagaggccagtgcggcggcggtgtcccttgaagaacaggcggcacgattaactgaggcggtggatgtattccgtctgcacaaacattctgtgagcgcagaacctcgcggagcgggtgaaccagttagtttcgctacggtgtgaaaatgttcaaggagggatcgacagatcccttcacctttcagaacggcatactttttcgaatagcgttaatcatcaactggcaaccagaagagaacgtcgcatctacgcgggtcagtattccaatcggttcgcctgcaccatgtcccggaacaggcagggccaccagcgtggcatgacgcaggtcgtcttttacagcgccagaagggacaaaccacacgtaatcgtattcaaccgtaagttgacgagataggctagcagacagcgtttcgatacaaccgctaggaattttacagccctggctctgcactaatgcatcactatgctggcgtggcgcagtgccttctggacttacaacgaccggccattccagcacccggcttagcgttacgttctcctgaagtagcgggtgattagggcggacaaccagcttcaagctttcaagaaacagcagttcgtaattaagcccggtcatcagttcaggatcactcatccgaccaatgccgatatcgatttccccggtttttaaacccgccagaatcatagggttactcattgtcgcaacttgcaaggtcgtctctttttgttgctgatgaaactgacctataacgctaggtaatatccccagtgccgcagtaggtagtgcaccaaccctgacgacatcattattaagaccttctttacgatgaaggctccgtccggcagtgttgatggcgtcaagaactctgactgcatgcgttaaaaattgttcgccgggtaaggtaagttgcgccccctgacgaccacgctcaaacaagcgagcgccagtcagctgctccagttcattcaatgtcttagagagcgcaggttgactcaaattaagggtttcagccgcgcgccccaaagttccttgttgtgcgacagctacgaatgtatgaaggtggcgcaaacggatgcgctgactaaacagactatttttttccataagcgatgttaaaaacgaagcggtgtcgctgacaagtgaagttgtttgattatgataacttgattgcaaaatattattaacaattaaagcaattatgttacagcaaaatggataatattgatgttttcgcggcgagatcacagtttgtaaattcttcccgcaagagtgaatgcggttacctacactccagattactgaccactggaggcagacactatggcgaacagcatcacggcggatgagattcgggaacagtttagccaggcaatgagtgccatgtaccagcaagaagttccgcaatatggcacgctgctggaactggtagctgatgtgaatctggctgtgctggaaaacaatcctcaactgcacgaaaaaatggtaaatgcagacgagctggcgcgactgaatgttgaacgtcatggggcgattcgcgttgggactgcacaagagcttgctactcttcggcggatgtttgccattatggggatgtacccggtgagctattacgatctcagccaggcaggggtgccggtacatagcacagcatttcggcccattgatgatgcttctctggcgcgtaatcccttccgcgtttttacctccttactccgccttgagcttatcgagaacgaaattttgcgccagaaagcggcggagattctgcgtcagcgcgatatcttcaccccacgttgtcgacaactgttagaggaatatgagcagcagggcggctttaacgaaacacaggcacaggagtttgtgcaggaagccctggaaacgtttcgctggcaccagagtgcaacggtagatgaagaaacctatcgcgcattgcacaacgaacatcggttgattgctgatgtggtctgttttcctggatgccatatcaaccacctgacgccacgtacgctggatattgaccgggtgcagagcatgatgcctgaatgcggaattgaacccaaaattctcatcgaggggccgccgcgccgcgaggtaccgattttactacgccagaccagctttaaagcactggaagagacggtgttgtttgcggggcagaaacagggcacgcataccgcgcgctttggtgaaattgagcagcgtggcgtggcattaacgccgaaagggcgacaactgtatgatgatcttctgcgtaacgctggaaccgggcaggataatctcactcaccaaatgcatttacaggaaaccttccgcacttttcctgacagtgagtttttaatgcgtcagcaagggttggcatggttccggtaccgtctgacgcctagcggtgaggcgcatcgtcaggcgattcatcctggagacgatccacagcccttaattgaacgtggttgggtagtggcgcaacccatcacctatgaagatttcttgcccgttagcgcggcggggatcttccagagtaatctgggtaatgaaacgcagacacgcagtcacggtaatgccagtcgcgaagcatttgagcaggcgttgggttgtccggttttggatgagttccagctttaccaggaagcggaagaacgcagtaaacgtcgctgtggtttgctttaaaatctgaccatccgcctttgcaaaaatttgcctgattttacaaacgaatcaggctcatcccatcgacataaaaaaaatgccgatttatgcatattctctcagttcaacaattggattattaataaatattgtctagagtgagcggtcataaataagcactttcttgccgctgaaaacgaccagcgcgggaccattcacaacaccagaaggactcactttcaggtatggatcgtagacgatttattaaaggttcaatggctatggccgccgtgtgcggtaccagcggcattgcttctcttttttctcaggcggcattcgcggcagattctgatattgccgacgggcaaacccagcgttttgacttctccattctacagagtatggcgcacgacttagcgcaaacagcgtggcgtggtgcgcctcgtccgttacctgacacgctggcgacaatgacgccgcaggcttataacagtattcaatacgacgccgaaaaaagcctctggcataacgttgagaaccgtcaactggacgctcagttcttccatatgggaatgggattccgtcgccgcgttcgtatgttttctgtagatccagcaacacatctggcgcgtgaaattcactttcgcccggagttgttcaaatacaacgatgcaggtgttgatacaaaacaattagaagggcaaagcgatctcggctttgccggttttcgcgtgtttaaagcccccgaactggcgcgccgtgatgtagtaagttttctcggcgcgagttatttccgcgccgttgatgatacatatcaatacggtttgagcgcccgcggcctggcgatcgacacttacaccgacagtaaagaagagttccccgactttaccgccttctggtttgatacggtaaaaccgggggcaactacctttaccgtttatgcgttgctcgatagcgccagcattactggtgcctataagttcactatccattgtgagaaaagtcaggtgattatggatgtggaaaatcacctgtatgcgcgcaaagacattaaacagctgggcattgcgccgatgaccagtatgttcagctgcggtactaatgaacgtcggatgtgcgatacaattcatccgcaaattcatgactctgatcgtctgtccatgtggcggggcaacggcgagtggatttgccgtccgctgaataatccgcaaaaattgcagttcaatgcttacaccgacaacaacccgaaagggtttggtttattgcaactggatcgtgacttctcccattatcaggacattatgggctggtataacaaacgcccaagtctgtgggtggaaccgcgtaacaagtggggtaagggcaccatcggcctgatggaaatcccaacaacgggcgaaacgctggataacattgtctgcttctggcagccagaaaaagctgtaaaagcaggtgatgagtttgcattccagtatcgtctgtactggagtgcgcaaccgcctgttcattgcccattagcgcgcgttatggcgacgcgtaccggcatgggcggtttcagcgaaggttgggcgccaggtgaacactatcccgaaaaatgggcgcgtcgttttgccgtcgatttcgttggtggtgatctgaaagctgccgcgccaaaaggcattgagccggtgattacgctttccagtggggaagcgaagcaaatcgaaattctctatattgaacccatcgatggttatcgtattcagtttgactggtatccgactagcgactccactgatccggtcgatatgcggatgtatctacgttgtcagggggacgctatcagtgaaacatggctgtatcagtatttcccgccagcgccggataaacgtcagtatgttgacgaccgcgtgatgagttaatcgttttttcttcggcaccttcttcgggaggtgccgtctggttaaacacgatcccgctcgcatttttccctaagttaaatgagtaatctgatggtgtgtatttcagatacaccttgtcagccactaacagggagtgcgtatgtttccagaataccgagatttaatatcccgtctgaaaaacgaaaatcctcgctttatgtccttgttcgataaacacaataaacttgatcatgaaattgccagaaaggaaggttccgacggtcgagggtacaatgcggaagtggtccgcatgaaaaaacaaaagctacagttaaaagatgagatgctcaaaatcctgcagcaggagagcgtcaaagaggtgtaaactttcctaagccgccagccaggcggcttttttaacaactgcatggattgactggagataagatgactgaaacgataaaagtaagcgaaagtcttgaattacatgctgttgcagaaaatcacgtcaaacctctttatcagttaatctgtaaaaataaaacctggttacagcagagcctaaactggccgcagtttgttcaaagtgaagaggacacgcgaaaaacggtgcagggtaatgtgatgttgcatcaacgcggctatgccaaaatgttcatgattttcaaagaagatgaacttatcggcgttatcagctttaatcgtattgaaccactgaataaaaccgctgaaatgggctactggctggacgaatctcatcaggggcaggggatcatttctcaggcgctgcaggcattgattcatcattacgcccagtctggtgaacttagacgcttcgtgatcaaatgtcgggtggacaatccgcaaagcaaccaggtcgctttgcgcaatggttttatccttgaaggttgcctgaaacaggctgagttcctgaatgatgcctatgatgatgtgaacttatacgcgcgtattatcgatagtcaataatcacaataaccctgccagcggcgttcgcgtaatgcgctcctcgccgttaatgacttttggaccacggacatgaaccgtgtcgccatcaaaggcttcaacgacggcgtggtcggttaactccacatggttttcaattatcaccgcacctgtaatacggctctcaccttgtatgacaacgtgctcgtcgagcagaatcggtccgccacgtaccacggcatttccgccaaccaagacatgatgttttaacacacaattaccttccacaatggcatattccgccacctggctactgtaatgaatcgtcggaatggcatcttcttctatgccagctttcacctgcgcgtgaccgtagactttagcgcaatcgcatagccagacattgttctcttcattaccttcaatactggcaaaatcaaaaacttcggcgcgatgttcaataaaagcataccggacgacggcatcgccataaatttgtgcctggtggacaatacggctggcgctaacccttgcgcgatcataaatttggagcaggagttgatggtcgggcgttaagccttgtgcggcgacgatcatagaatgttgatcaattaaggcgtgaccaaatattctacattgcccgtaaactaaactgtcatgaatggtgacgctgtcacttatatatgcaccctggctgatttcactattatcgatccagacgttatccgttgcgtaaacctctccccacagcacgctggtgccggtgatacgcgtattaccggaaatcaccgctccgccgaacgcaatagcattctggtcgtaaatccagcaatttccttcttgtgctaacaccgtttcgcgatcgatccagccgccagcggttcctgctatcacatcgttaaaatcgctaatggcgataatctgccgtaataacacattttttttagtgccatcttcctgataactaaaggctcgctgttcttcacttagacgatatttgcgcatagcgttttcccacaggtgacttactataaccgtagcaaattctgcggctctggctatgctcgagaaaattccataaaatgcatttcaaatatactttataaattaaacaaaatgagtaagaagatgcagagcgataaagtgctcaatttgccggcaggctactttggtattgtgttggggacgatagggatgggatttgcctggcgctatgccagccaggtttggcaggtcagccactggttaggggatgggctggtgattctggcgatgatcatctggggattattgactagcgcatttattgcccgactcatacgctttccgcatagcgtgctggcggaagttcgccatccagtgctgagcagttttgtgagtttgtttccggcaacgacgatgctggtggcgattggttttgttccgtggtttcgcccactggcggtgtgcctgttcagttttggtgtcgtggttcagttggcttatgccgcctggcaaactgcgggattatggcgcggatctcaccctgaagaagctaccacgcctggactgtatctgccgacagttgccaacaactttatcagcgcaatggcctgtggtgcgttgggctacaccgacgccggtctggtgtttttaggcgcaggcgttttcagttggctaagccttgaaccggtgatcttgcagcgtctgcgcagtagcggagaattacccacggcactgcggacaagtctcggcattcagctcgctcctgcgctggtggcttgtagtgcctggctgagcgtcaacggcggcgagggtgacacgctggcgaaaatgcttttcggttatggactgctgcaactgctgtttatgctacgtctgatgccatggtatctctcccagccatttaatgctagtttctggagtttcagcttcggcgtatctgcactggcaaccaccggtttgcatctggggagtggcagcgataatggatttttccatacgctggcggtgccgctgtttatctttaccaattttattattgcaatactgctcatccgtacttttgcgcttctgatgcagggaaaattgttagtcagaaccgagcgcgccgttttaatgaaagcagaggacaaagaatgatcattcgtgacgaaaactattttactgataaatatgaattaacccgcacacactctgaagtactggaagcggtgaaagtggttaaaccgggtaaaacgctggatctgggctgtggcaatggtcgtaacagtctttacctggcagccaatggttatgatgttgacgcatgggataaaaatgccatgagtatcgccaacgtcgagcgcattaaatccattgaaaatctggataatttacacacccgagtcgttgatctgaataacctcacatttgatagacagtacgattttattcttagcactgtggtgctgatgttccttgaggctaaaaccatccccgggttgattgccaatatgcaacgttgcactaaacctggtggttacaacctgattgtggcggcgatggataccgctgattatccatgtaccgtcggcttcccgtttgccttcaaagagggagaattacgtcgatattacgaaggctgggagagggtgaaatacaatgaagacgtcggcgagctgcaccgcaccgacgccaacggtaatcgtattaaactgcgtttcgccacgatgctggcacgtaaaaaatgacccggtaagcacaaaacgcgtgaaaattccccacgctgagatgatttactgttcttcttttcggtaagcatattttttatcgaagggatgtgaaattaatcacagtagtcgaagtttttagcagcttaacttactgaaatttaagtactgatgattgacttagcccctttttcggcattgactatgtcgtctgaaaaggggctgaaaaatttattttcaccaacactttttttgccacaacacgaagcggcgctttttgctataacttagaaagtaatataatcatctcaggaaactattcatgcgtaccacaagttttgcgaaagttgcagctttatgcggcttattggctctgtctggttgtgcatctaaaatcacccagccagataaatattctggttttttaaacaattactctgatttaaaagaaacaaccagcgctacaggtaaacctgttttacgttgggtagacccgagttttgatcaaagcaaatatgacagcatcgtctggaacccaatcacttattatccggtaccgaaaccgagcacccaggtagggcagaaagttctggataaaattttgaactataccaacaccgaaatgaaagaagcgatagcgcagcgtaaaccactggttaccaccgctgggccgcgtagtctgattttccgtggggccattaccggtgtagataccagcaaagaagggctgcaattctatgaagtggttcctgttgcattagtggttgcggggacgcaaatggctacaggccaccgtaccatggatactcgcctctattttgaaggtgagctgattgatgcagcgactaataaaccggttatcaaagtcgttcgtcagggcgaaggtaaagacctgaataacgaaagtacgccaatggctttcgaaaatattaaacaagttattgatgacatggcgaccgatgccaccatgtttgacgttaacaaaaagtaattccagacgcgccatcgttagatggcgctttttatccggtgcgccgtaaaaccccatccttcagggcggggatataaggcgcggttttccacctgaccaggtgtttgctgttgttcaatgtattggcggatgacggatattggcgcacctccgcagctactggcaaaatagccaggactccacaaaacgcctttgtagtaatacctgaatgcaatatctggtcgatctcgtcgcagtcacctacccgatacgcctttgaggctgtttaccagactggatatcgccagtttgggaggatagttaattaacaaatggacgtgatctggttcgccatccatttcaaccagttcagcttcaaaatcagcacatacatttgaaaagtaagtgcgtagtttttctgtcgcgtcatggtcaaaaatctggcgtcggtatctggtgacaaagagcaggtgaacatgcatcaggaaaacacaatgccttccacgccggatatcggtttcttttttcacagaccaaagtatcatttgacctgtgaaacgattacaggcatttaaattccagttaagacccggtggtcaacaggagtgtgaaatgaggcgcttcgcaggcgcatgtcgtttcgttttcaatcgtgctctggcacgtcagaatgagaatcatgaggccggtaataaatacatcccttacgggaaaatggcttcctggctggttgagtggaaaaatgccactgaaacgcaatggcttaaagattctcccagtcagccattgcaacagagtctgaaagaccttgagcgggcttacaaaaacttcttccggaagcgggctgcttttccccgattcaaaaagcggggacagaatgatgcattccgctacccgcagggcgttaagctcgatcaggaaaacagccgtatttttctgccgaaactgggctggatgcgctaccggaacagccgtcaggtcacgggtgttgtgaaaaatgtcactgtcagccagtcctgcggtaagtggtacatcagtattcagacagaaagtgaagtaagtactccggttcaccctagtgcaagtatggtcgggctggatgctggcgtggctaaactcgccacgctgagtgatggcacagtctttgagcctgtaaacagttttcagaaaaaccagaagaagctggcgagacttcagcgacagttaagccgcaaggtcaaattcagcaacaactggcaaaagcagaaacgcaaaatacagcgactgcattcctgtatcgcaaatatccgcagggactaccttcacaaagtcacaacggccgtcagcaaaaaccacgcaatgatagtcattgaggatttgaaggtcagcaacatgagtaagagtgcagcgggtacggtcagccagccggggcgcaatgtccgggcaaaaagtggtttaaaccgtagcatactggatcagggctggtatgaaatgcgccgccagcttgcgtataagcagctctggcgtggcggtcaggtgcttgctgttccgccagcgtatacaagccagcgttgcgcgtactgtggtcatacagcgaaagagaaccgcctgagtcaaagtaaattcagatgccaggtatgtggatatacagcgaacgccgatgtaaatggcgctcgcaacattttagcggcggggcacgccgttcttgcctgtggagagatggtgcagagtggccgcccgttgaagcaggaacccaccgaaatgattcaggcgacagcctgaacgtagcagggatccacgtccttcagggcgtggaggatgtcaatatcggtttctgtcagcgattaaattcaacaccacgtaacaaacgcctccggcaattaatccccaaaacgcagaaccaatcccgaccagcgtcaatccacttgccgttaccagaaatgccaccaccgccgcgtctcgctcacgctcattatgcagcgcctgatacaaactgccgccgatggtacttaacagcgccagacctgccagcatctggatccaacttacgggcagggcagccatcatcccggtaatggcactaccaaacagacctgcgagcaaatagaaaatgcctgcaacggcagcggccagccaacgttgatctttatccggatgcgcttccgggctttggcaaatagccgcggtgattgccgcaataccgacggaataaacgccgaaaggggaaaaaaccagtgccagcaatccagtaaatacaattaatgggctaacaggagcgctatatccagctgctttcattgctgcgatacccggtgcgttttggcttgccatcgtcaccagaaaaagggggagtgcaacgctcaggctgtgagcaaagctaaaatcaggggtaatataagtggggagaacgggtttaaagacaacatcagttgtgacaacgtcaccttgcgcgatgacgatcacgatcccaataatcatcgcggcaattaccgcatagcgcggcgcaacggccttggttgccagccataccagcaacatacttccacacaacgtaaattgaccgtccagactggcaaacgcctgtaaaccaaagcgtaataaaatcccggcaagcattgccgccgcaaggctgtgcggaataatgcgcatcagacgagcaaagagtcccgttatgccgcagaggactattagcgcgttggtgacaataaaaacgccgatggcttcgttaagtgttagtccctgcaatccggtgaccaacaaagccgcgccaggcgtactccatgcggtgagaacaggtacgcgataccataatgtcagagtcagcgtactgacgcccattgccagccccagcgccgtcatccagccagagatttgtgcagtggtggctccggcgacaatcgctgcttgccagattattgccgcactactggcgtagccaattaataccgccagaaaccccgccagtagcgtgggtggaggaatagaaaacagacgcatagtcacctcgtgcgttatagcgtacaggcaccgtagcatttgtccgttataacgcacaagtgataaacttccgttttgccggaggagtcgcatggaaaatctcgctcgctttttatccaccacacttaaacaactacgccagcagcgcggctggagtcttagccgactggcagaagcgacgggcgtttctaaagcaatgttagggcagattgagcgtaatgagtccagtccgacggtcgcgacattatggaaaattgccaccgggttgaacgtaccatttagtacatttatttctccgccgcagtccgctacgcctagtgtttatgatccacaacagtaggcgatggtgatcactagcctgtttccttatgatccacaactctgctttgaacacttcagcattcagatggcatctggtgcaataagcgaaagcacgccccatgagaagggggtaatcgaacatgtcgtcgtcattgatggacaacttgatctgtgcgttgatggggaatggcagacccttaattgtggggaaggcgttcgatttgctgcagacgtcacgcatatctatcgtaatggtggggagcaaaccgtacattttcattccctcatccattacccgcgcagttaagcgggaaaactatttcgcaacgtcgcgcttgtggctaaaatagccgccatttttcagctactggataagaatgtgaccgtatcttctcatcgacttgaactgttaagcccggcacgcgatgccgccattgcccgcgaagctattttgcacggtgccgatgctgtttatatcggcggccctggttttggtgcccgtcataatgccagtaatagcttgaaagatattgccgagctggtgccgtttgcccatcgttatggtgcaaaaattttcgtcacgcttaacaccattttgcatgatgatgagctggaacccgcgcaacggctgattactgacctctaccagaccggtgtcgatgcgctgattgttcaggatatggggattctggaacttgatattccgccgattgaactgcacgccagtacgcagtgcgacattcgtacagttgaaaaagcgaagttcctctctgatgttggcttcacgcagattgtgctggcgcgagagctgaatcttgatcagatccgcgcgattcaccaggctacggacgcgaccattgaattctttattcatggggcactgtgcgtggcctatagcggtcagtgctacatttctcatgcgcaaacagggcgtagcgccaaccgtggcgattgcagccaggcgtgccgtttgccatacacattgaaagacgatcaggggcgggtggtttcctatgaaaaacatctgctgagcatgaaagataacgatcagactgccaacctcggcgcgctgattgatgctggtgtacgctccttcaagattgaagggcgttacaaagatatgagctacgtgaagaatatcaccgcccattatcgccagatgcttgatgccattattgaagaacgtggcgatctggcgcgcgctagtagtggtcgtactgaacatttctttgttccaagcacggaaaagactttccaccgtggtagcacagattattttgtgaatgcccgtaaaggcgatattggcgcgttcgatagcccgaaatttatcggcctgccggtaggcgaagtagtgaaagtggcgaaagatcatctcgatgttgccgttaccgagccactggcaaatggcgatggcctgaacgtgttgattaaacgtgaagtcgtcggttttcgtgccaatacggtcgagaaaaccggagaaaatcagtaccgcgtctggcccaatgaaatgccagcagatttgcacaaaattcgtccacatcacccactaaaccgtaatcttgatcataactggcagcaggcactgacaaaaacctccagcgaacgtcgggtggcggtagacattgaactgggcggctggcaggaacaactgattctgaccctcaccagtgaagagggtgtcagcatcacgcatacgctggacgggcagttcgacgaagccaataacgccgaaaaagcaatgaacaatctgaaggatggtctggcaaaactggggcaaaccctctattacgcccgcgatgtgcaaattaatttgccgggggcgctgtttgtaccaaacagtctgttaaaccagttccgccgtgaagctgctgacatgctggatgctgcgcgtcttgccagttaccagcgcggcagccgtaaaccggttgctgatcctgcgccggtttatccgcaaacgcatctgagtttcctcgcgaacgtatacaaccagaaagcgcgtgaattttatcatcgctatggtgtgcagctgattgacgcggcgtatgaagcacatgaagagaagggcgaagtcccggtgatgatcaccaagcattgtctgcgctttgcctttaatctgtgcccgaaacaggcgaaaggcaatatcaaaagctggaaggcgacgccaatgcaactggttaacggcgatgaagtattaacgctaaagtttgattgccgcccatgcgagatgcacgtcattggcaaaatcaaaaatcacatactgaaaatgccgttaccgggaagcgtagtggcatccgtaagtccggatgagctgctgaaaacattgccgaagcgaaaagggtaaaacgccagttttctggttactcacaacttattgaatctgcatgatattgcctgccgggtaaggcgttacgccgcatccggcatcaaatgactcaacgttgtcccgcttctggtttgcggcttttttgccagtaaaaatgctcgcgcaaaccttccgcgctctcttccgccacagcacgcaattcatcgctgtccgcttcatgacgcagctgatgatccacattctttacccacacaaattcatgtcctttgtgccctgccatgagttgtccactaaacagagcacacgttaataagacaacgcttaacgccttcgtaaacatcctgccacctttttcttaccttttgccgctatgatgccgatcgtttcttgaggttattattcagttttgcaaattagcgcaaagaaattctggaatcttccttcctgattttgcattgcattctgccgttgcggcgatttagtgctattttcgagcaaattacacacggaggtaaacactaatgtttactttgttgatatactcagcggcagggaggcgatgtgaaacaaagcgagttcagacgttggctcgaatctcagggcgtcgatgtagcgaatggcagcaaccatttgaaactcaggtttcatgggaggcgcagtgtcatgccgcgtcacccctgcgatgagattaaagaaccattgcgtaaagcaatcctgaaacaactcggtttgagttaatcgccaattaaaaaggttaatgacatgcgagagacagtcgaaattatgcgttatcccgtcactcttacacccgcgccggaaggcggttatatggtttcttttgtggatatccctgaagcgttgacccagggcgaaactgtcgctgaagcgatggaagcggcaaaagatgctttactgaccgcatttgatttttattttgaagataacgagcttatccctttacctagcccattaaatagtcacgatcactttattgaagtacctttgagcgtcgcctctaaggtattgctgttaaatgcttttttacagagtgaaatcactcagcaagagttagccaggcgaattggcaaacctaaacaggagattactcgcctatttaacttgcatcatgcgacaaaaatcgacgccgtccagctcgcggcaaaggcgcttggcaaagagttaagcctggtgatggtttaattacagttaacgaaaagttgtcatttttaacaactgatatagactgccgaatcatctgcacataattacgattcgataatgaaaaaataccagcagcttgcagaacaattacgcgagcagattgcgagcggtatctggcaacccggcgatcgtttgcctagcttgcgtgaccaggtggcgcttagtggcatgagctttatgactgtcagccatgcctatcagttgctcgaaagtcagggatatattatcgcacgaccgcagagcggttattacgttgcgccacaggcaataaaaatgccgaaagcgccagtcattccagtcactcgagatgaagcagtcgatatcaacacttatatttttgatatgttgcaggccagtcgcgatccgagcgtcgttccgtttgccagcgcctttcccgacccgcgacttttccccctccaacaactaaaccgcagcctggcgcaggtaagcaaaaccgccacagcgatgagcgtgattgaaaacttaccgccaggaaacgcagaactgcgtcaggctattgctcgtcgctatgccttacagggcatcaccatttctcctgatgaaattgtcattactgccggggcgttagaggcattaaacctcagtttgcaagcggtaactgaaccgggcgattgggtgatagtagagaatccttgtttctacggtgcgttgcaggcgctggagcggctacggctgaaggcgttaagcgtggcgacggatgttaaagaagggatagatcttcaggcgctggaactggcgttgcaggagtatccggtgaaagcgtgctggctgatgactaatagccagaatccactcggatttaccttaacgccgcaaaaaaaagcacaactggtggcgttgctcaatcagtacaacgtaacgctgattgaagatgacgtttacagcgaactttattttggacgggaaaaaccgctgcctgcgaaagcgtgggatcgccacgatggcgttttgcattgctctagctttagcaaatgtctggtgcctggttttcgtattggttgggtcgccgccggaaaacatgcacgtaaaattcaacgcttgcagttgatgagtacgctttccaccagcagtccgatgcaacttgcgctggtggattacctttccacgcgccgatacgacgcccatcttcgtcgcctgcgtcgccagcttgcggaacgtaaacaacgtgcctggcaggcactgctgcgttatctgcctgcggaagtgaaaattcatcataatgacagtggttactttctctggttggagctccccgagccgttagatgccggcgaattaagcctggcggcactgacgcatcatatcagtattgcgccgggtaaaatgttttctaccggtgaaaactggagtcgttttttccgttttaataccgcgtggcagtggggagagcgtgaagaacaggcggtaaaacaattaggcaaacttattcaagaacggctgtaatagcgtttaatttaattcctcttagattgggtaatatgaatttcgaatagcagtcatatttcctaactccttgactatactccagaagataaccttacagacggcataatgcgcggtagctcacaacctgaataaattttctcaggggcgaaggtgtgcctgcaagccgccgtctatggttaaacaaggagatatttttacggcacggcggctgaacaattaattacgacaggagtaagaccttatgagcaagacatttgcccgcagcagcctgtgtgcgctcagcatgacaataatgaccgctcacgccgccgaaccgcctaccaatttagataaaccggaagggcgactggatattatcgcctggccgggatacatcgaacgcggacaaactgataaacaatacgactgggtaacgcagttcgaaaaagagacaggctgcgcggtgaatgtgaaaaccgccgcgacttccgatgaaatggtcagtctgatgaccaaagggggttacgatctggttacggcatccggcgatgccagcctgcgtttgattatgggtaaacgcgtgcagccgattaataccgcattgattcccaactggaaaacgctcgatccgcgcgtggttaaaggcgactggtttaatgttggcggcaaagtttacggcacaccttaccaatgggggccgaacctgctgatgtacaacactaaaaccttcccgacgccgccggatagctggcaagtggtttttgttgagcaaaatctgccggacggcaagagcaataaaggccgcgttcaggcttatgatggccctatctatattgcggacgctgcgttgttcgttaaagccactcagccgcagttgggcatcagcgatccgtatcaactcaccgaagaacagtaccaggcggtgctgaaagtgctgcgcgctcaacacagtttgatccatcgctactggcatgacactaccgtgcaaatgagcgatttcaaaaacgagggtgtggttgcttccagtgcctggccctatcaggccaacgccctgaaagccgaaggccagcctgttgctaccgttttcccgaaggagggtgttaccggttgggctgataccaccatgctgcatagcgaagcgaaacatccggtttgcgcctacaaatggatgaactggagtttaacgccaaaagtgcagggcgatgtggcggcctggtttggcagcttaccggtagtgccggaagggtgtaaagccagtccgttattaggcgaaaaaggttgtgaaaccaacggttttaactatttcgacaaaatcgccttctggaaaacgcctatagcagaagggggcaagtttgttccctacagtcgctggacgcaggattacattgccattatgggcggtcgctaacttcgctggggtgctttatgacgtacgcagtggagtttgacaacgtcagccggttgtacggtgacgtgcgcgcagtagatggcgtcagtattgcgataaaagatggtgagttcttctctatgctggggccgtccggctccggcaaaaccacctgcctgcgcctgattgctggcttcgaacagctttccggcggggctatctctatctttggtaaacccgccagcaatctgccaccgtgggagcgggacgtgaatactgtctttcaggactacgcgctatttccgcatatgagcattcttgacaatgtcgcctatgggctgatggtcaaaggcgtgaataaaaagcagcggcacgcaatggcgcaagaggcgctggagaaagtggcgttggggtttgtacatcaacgtaaaccgagtcaactttctggtggtcagcgccagcgggttgctatcgccagagcattggtgaatgaaccgcgcgtattgctgttggatgaaccgctcggcgcactggatctcaaattgcgtgagcagatgcagctggaactgaaaaaactgcaacagtctctcggtatcacttttatcttcgttacccacgatcagggcgaagcgttaagcatgtccgatcgtgtggcggttttcaataatggacgcattgagcaggtcgattccccgcgcgatctctatatgcgcccgcgcacgccgtttgttgccgggttcgttggtacaagcaatgtttttgatggactgatggcagagaaactttgtggcatgacgggaagcttcgccctgcgaccggaacatatccgcctcaacacccctggtgaactgcaggccaatggcacgatccaggcggtgcaatatcagggcgcggcaactcgttttgaactgaaattgaacggcggtgaaaaactgcttgtgagtcaggccaatatgacaggcgaagaactgcctgccacgctcacgcccggacaacaggtgatggtttcctggagccgtgatgtgatggtgccgctggttgaggagaggtgaatggcgatgaatgtattgcaaagtcctagtcgtccaggtctgggtaaggtgtccggtttcttctggcataatccggggctggggctgtttttactgctgcttggcccgctaatgtggtttggcattgtctatttcggcagcctgctgacactgttatggcagggattttatacttttgacgatttcaccatgagcgtaacgccggaactgacgctggcgaatatccgtgcgctgtttaatccggcgaattacgacatcattctccgcacgctgactatggctgtggcagtcactatcgccagcgccattctggcttttccaatggcgtggtatatggcgcgctataccagcgggaaaatgaaagcgtttttttatattgcggtaatgttgccgatgtgggcgagctacattgttaaagcctatgcctggacgttattgctggcaaaagatggcgtggctcagtggtttttacaacatcttgggctggaaccactgctgactgcgttccttacattacctgcggtgggcggaaatacgctgagtacttccgggctggggcgctttctggtgtttctctatatctggttgccgttcatgatcctgcccgttcaggcggcgcttgagcgtttgccgccgagtttgttgcaggcgagcgctgatctcggcgcacgtccacgacaaacctttcgctatgtggtgctgccgctggcaatcccgggtattgccgctggctctatctttaccttcagtctcacactgggcgattttatcgtcccgcagctggttggtcctccaggatattttatcggcaatatggtttattcccagcagggggcgattggcaatatgccgatggcggcggcattcaccctggtgccgattattctcatcgcactgtacctggcgttcgtgaaacgtctgggagcgttcgatgcactctgaacgcgcaccgtttttcctcaaactggcggcctggggcggcgttgttttcctacattttcccatcctgataatcgccgcctatgcgtttaacactgaagatgcggcgtttagttttccaccgcagggcctgacgctgcgctggtttagcgtggcagcacagcgtagtgatattcttgatgccgtgacactgagtcttaaagtggcggcgctggcgacattaattgcgctggtgttagggacgctggcagctgccgcgctgtggcgacgagactttttcggcaaaaacgccattagcctgttactgctgctgcccattgcgctgccgggcattgtcactggtctggcgttattaaccgcctttaaaaccatcaatctggagccgggatttttcaccatcgtggtcggtcatgcgactttttgtgtagttgtggtgtttaacaatgtcatcgcccgttttcgccgcacctcctggagtctggttgaggcgagtatggatcttggggccaatggctggcaaaccttccgctacgtagtgttgccgaatctcagtagcgcgttactggcaggaggaatgctggcgtttgccttgagcttcgatgaaatcatcgttacgacctttacggcaggtcatgaacgaacgttaccgttgtggttgctcaatcagcttgggcgaccgcgtgatgtaccggtaactaacgtggtggcactgctggttatgttggtaacaaccttgccgatcctgggggcctggtggctaacccgcgaaggcgacaatggtcaataaccactgatacaggaatatgctatgcaacataagttactgattaacggagaactggttagcggcgaaggggaaaaacagcctgtctataatccggcaacgggggacgttttactggaaattgccgaggcatccgcagagcaggtcgatgctgctgtgcgcgcggcagatgcagcatttgccgaatgggggcaaaccacgccgaaagtgcgtgcggaatgtctgctgaaactggctgatgttatcgaagaaaatggtcaggtttttgccgaactggagtcccgtaattgtggcaaaccgctgcatagtgcgttcaatgatgaaatcccggcgattgtcgatgtttttcgctttttcgcgggtgcggcgcgctgtctgaatggtctggcggcaggtgaatatcttgaaggtcatactagcatgatccgtcgcgatccgttgggggtcgtggcttctatcgcaccgtggaattatccgctgatgatggccgcgtggaaacttgctccggcgctggcggcagggaactgcgtagtgcttaaaccaagtgaaattaccccgctgaccgcgttgaagttggcagagctggcgaaagatatcttcccggcaggcgtgattaacatactgtttggcagaggcaaaacggtgggtgatccgctgaccggtcatcccaaagtgcggatggtgagcctgacgggctctatcgccaccggcgagcacatcatcagccataccgcgagctccattaagcgtactcatatggaacttggtggcaaagcgccagtgattgtttttgatgatgcggatattgaagcagtggtcgaaggtgtacgtacatttggctattacaatgctggacaggattgtactgcggcttgtcggatctacgcgcaaaaaggcatttacgatacgctggtggaaaaactgggtgctgcggtggcaacgttaaaatctggtgcgccagatgacgagtctacggagcttggacctttaagcagcctggcgcatctcgaacgcgtcggcaaggcagtagaagaggcgaaagcgacagggcacatcaaagtgatcactggcggtgaaaagcgcaagggtaatggctattactatgcgccgacgctgctggctggcgcattacaggacgatgccatcgtgcaaaaagaggtatttggtccagtagtgagtgttacgcccttcgacaacgaagaacaggtggtgaactgggcgaatgacagccagtacggacttgcatctagcgtatggacgaaagatgtgggcagggcgcatcgcgtcagcgcacggctgcaatatggttgtacctgggtcaatacccatttcatgctggtaagtgaaatgccgcacggtgggcagaaactttctggttacggcaaggatatgagtctttatgggctggaggattacaccgtcgtccgccacgtcatggttaaacattaaggataatattgcagatcgtaagagtatgagatgatcttgcgtactgtcagagcactgatttctctgacagtacgtgctgcgtgcaaaatcactacatcaaataaaccagccaaatctcatagagataagagtaaacaaaccaacagcagcaaagaaatttatcagtactacagttctactggaaacattcatttttgccaccttttatcattgcccctatgtgtatagtacgggttaagaaaatccgcaataatactcattctgaagatggataagggcaagttgctgtttgatgattttttctcaaactggtgaaaaaacttgatgcacgtcaaaaaatgacgcatatttgcgcgcgttttattcatctggctggacgcccgtacatgtctctctatcaacacatgcttgttttttatgcggttatggcagcaatcgcatttcttatcacctggtttctttctcacgataagaaacgcatccgtttcttaagcgcctttctggtgggggcaacatggccgatgagtttcccggtggcgctgttgtttagtctgttttaaatcttactcactggcttgacggcaccacgcagacttatatcatttggatgaatcgataaatttcacaagtggctaaggagaaagtatgagccatctggatgaagtcatcgcgcgcgtggatgccgcgattgaagagagcgtcattgcccatatgaacgaattattaatcgccctgagcgatgacgcggagttaagtcgggaagatcgctacacccagcagcaacgtctgcgcacagcgatcgcccatcacggtcgcaagcataaagaagatatggaagcgcgccacgaacagttaaccaaaggcggcaccatcctctgattaaaaactgcgtctggctaccaaccaggcgccaaccacaagtaaaattgcgccacaaattgggccgaacaacgcccgtagtggtacgccatgactgcggaagatatccagcatcagaccgccaatcagctgactggcgaccagtacagcaatagttgtcgccgctcccacattctgatatccgctgatactggcgaagacaaaaaagcttcccagcaagccaggtataagtgtccaccagcgcacgctggacaccagttcgccaaaccccgccatgccttgtttaaaccataaaatagaaacaaagagcacaatccccaccagactgttcagcaacatggcgatgagaatggtagaggaggtctgggtgatgcgcaccatcagcgtgttctggacaaccagaccaattccggcggcaatcaaaaaagcaagggtgaggctctgattcatccaatcgcgtccggttcagtgcgctcgtcgagttgcaactgcataaatgtcagatccagccaacgaccaaatttagtgcctacctgcggcatttgcgcggtgacgacaaatcccaggctctggtggagatgcaggctggcctgattttggctttcgatcccggcgaccatgacatgcttcccgcaatcccgcgcttcatcaatcaatcggcttaacaatttacgccccagacctttgccctgatgatcgggatggacataaacgctatgttccacggtatggcgaaaaccatcgaaactacgccagtcgccaaagctggcatatcccgtcactacgccgttttcctcgctcaccagcactggataacctgctaaagtccgcgcttcaaaccaggcaatgcggttatcagcatccaccgtttggtcattccagatagccgccgtatacaacacggcgtggttataaatttccgcaatggcagcacagtcggctttgcgggcaaaacggatggacatgtctggcctcaataaaataatgatgatgatgttatcaatactatcgaaaacagcccgaagcaacggattcctcgatgaaattattgcgtgttgcagaggggatgtgacggctgcaaacaaaaccaatcccgtgagcctgctactattgatggattcatgccaaaagcacaggagagcattatggggcaacaaaagcagcgtaatcgacgttgggttctggccagccgtccacatggcgcacctgttccggagaatttccgtcttgaagaagatgatgtcgccacaccgggtgaaggacaggtgttactgcgcacagtttatttgtccctggacccgtatatgcgtggacgtatgagcgatgagccatcttatagtccgcctgttgatattggcggcgtgatggtcggcggtacggtgagccgtgtcgtggagagcaatcatcctgattatcagtctggcgactgggtgctgggctacagtggatggcaagactatgacatatccagtggtgatgatctggtgaaacttggcgatcatccgcaaaatccaagctggagcctgggtgtgctagggatgccaggctttaccgcttatatgggcctactggatatcggtcagcctaaagagggcgaaacgttggtggtagctgcggcgacaggaccagtgggggcgacggtggggcaaatcggcaaacttaaaggttgcagagtggtgggggtagccggtggcgcggaaaaatgccgccatgctaccgaggtgttaggcttcgatgtttgtcttgatcaccacgcggatgattttgccgaacaactggcgaaagcgtgcccaaaaggtattgatatctattatgaaaacgtgggcggtaaggtattcgatgcggtgctaccgttacttaatacatctgcgcgcattcccgtctgcggattagtgagcagctataacgctacagagctaccacccggtccggatcgtttacctctgttgatggctacagtgctgaaaaaacgtattcgcttgcaaggttttattatcgctcaggattatggtcaccgcatccatgagtttcagagggagatggggcaatgggtgaaagaggataaaatccactaccgcgaagaaattactgacggtttagagaatgcgccacagacgtttatcggcctgctgaagggtaaaaacttcggcaaagtggtgatccgcgtggcgggtgatgattaaagtttcaacggcggcgtaagccgccataaaaatccaggcaaaaagcttattttcagctttaattaactaaccacatcattgttctgctgctaataacaacaaaggtgagtggtttatgattattcactttaatacaccaggtgaattccttctgccatgcaggcagggttggacagaaaacacgcgaaggaattaaaatgcctggaacgggaaaaatgaaacatgtcagtttgactctgcaggttgagaacgacctgaaacatcagcttagtattggcgcattaaaacctggcgcacgcctgattactaaaaatctggcggagcaattaggtatgagtattacacctgtgcgtgaagcattattacgtctggttagcgtgaatgcgctttctgtcgcacctgcacaagcatttacagttccggaagtggggaaacgtcaattagacgaaatcaatcggatccgctacgaactggaattaatggcagttgctctggctgttgaaaacctcaccccgcaagaccttgcggaactccaggaattgctcgagaaattacagcaggcgcaagaaaagggcgacatggaacaaatcattaatgtaaacaggctatttcgcttagcgatttatcatcgcagtaatatgcccatcctgtgtgagatgattgagcaactgtgggtcaggatggggcctggtttacattatctctatgaagcgattaatccagcggaattacgggagcatatagaaaactatcatctgttactcgctgcgttaaaagcaaaagacaaagagggatgcagacattgtcttgctgaaattatgcaacaaaatattgctattttataccagcaatacaatcgttaaagtaaatgcccggcaaataccgggcatcaaggtaattactcaaatctccacgcaatattcatgccgacaccataatttcgtccggggctaggttcgtaatatcgcccgttactctcattgacaatgacagaaccaacgtattctttatcgaataaattatcgacacgaccaaataaatccacagttaaattgtggtaattgtatttatacccggtgaataagccgacgagagtataagacggcgcttttgccgtattttcatcatctgccataatatcgcccatataacgcgcttccgtgcctgcataccaaccatcttccggtacataacctatgctcgcaaagcccatattacgggcgatccctggcatccgattaccgttacaatcctgttcattgcaaacattgctgcgataggtcgcatcaagccaggtccaggacgcgtttacgcgaaaatctcctgcgaaacgttgatcccatgccagttcagcgccttgacgacgggtctttccggcatttttgtaagtcgtacgcccaccgctactgctatcgacaacaatttcatcatcagtgtcggtctgaaacaatgcgagactaagcagcccatcaccaatacgcgttttactgccgatctcaattgtatcgttggtggatggttttaaacctaagttcataccgctttgcccatcagcacgataagacagctcattaatcgtcggcgtttcaaaacctcgcccggctgccagatagatattccaggcatcggtcattgcatattttaagctaccggcaggtagccatttatgataactggcatcaccgctgtcatcgccgttacccggagtaacgtaatggtcgttggaatcaaaccacacggagctgtagcgcacgccagcatccaggctcagtttttcgctcagctgccactgcgtctgtaaatagggatcgatgttccacatcagattgcgttcgtcgcgacgcaactcacctttttgcccgtactccggcatgccgctattcaggcggaagttattgtagcccttgcggttttcactcatgttttcgtagttcaggccggtagtgaacgtgaccggaacgcccagttcaccacggtgtgtccagcggctgtctattccctggtaatggcgttgcagggtaatcacgccgcccgcatgactcgggttaagttgtggtgccatgggtatactctggtactgggtcgtttctcgctctccggcatacatcatcacactcatatcatcccggctactcaggctacgctcatagcgcaacccagcctgagtttgcttgatggtttttcgcgtgtcgtactgttctgcacgaggcgcttgttgtggattagccttccattctgctttggttagcccacctgggtcatctgctttgatatccacactattgaaaatcagacttaatttgctggcttcatcaatgcgtacgcccagtttggcattggctaaatttttctgtgcgccactatggtcacgatagccgtgggtcgtaaaacgcgtggtactgacggtgtaatcgacatcgccaggctgtgtgccgtctcccgttgcgcccgttgctttcagcccatagcgccagctgccaaaactgccgtagtaactactggcttcaatggttggtggctgttgtccggtctgggtggtgacattcattaccccaccagacgcgttgccatacagggcagagaaggggccacgcagcacttccacattttgcacactgcttaaatcgatgttggatgtttgcccttgcccgtcgggcatggtggcgggaataccgtccacatacaggcgaataccgcgaataccgtaagtggagcgggagccaaatccgcgaatgctcagctgtaaatcttgcgcatagttctgccggttttgtacctgcaaaccaggcacgccggtcagactttcggacaagttaatgcgcggtgttgccaggcgcatctcctcgccatccaccacgcttactgctgctggggtatccagttcactaaccacctgcggtgcggcactgacaatcatagtctgttcatcagcggcaaaaacaacgggggaaaggacaagcagtgcgggcaaaacggtctgtcggacggaaaaaatcttcatgaaaaaagccaggttaagaatgggaaaacgccgtcatggtaatgaaattgtaaatttatggaaaatgaaacggcacaatacgttaagtaattgagaaaattgtagtcgtaacggcaagaaatgctccacatttgagaaaataatgattaccattcccatttataacaagagcgtaacgatgattacgcttagcgaagcattgtgaagcagcaaaaatatcggttcatcaaagggagtcgtcatgcatttacgtcatctgtttagtagccgcctgcgtggtagtttactgttaggtagtttgcttgttgttagtagtttcagtacgcaggccgcagaagaaatgctgcgtaaagcggtaggtaaaggtgcctacgaaatggcttatagccagcaagaaaacgcgctgtggctcgccactagccaaagccgcaaactggataaaggtggcgtggtttatcgtcttgatccggtcactctggaagtgacgcaggcgatccataacgatctcaagccgtttggtgccaccatcaataacacgactcagacgttgtggtttggtaacaccgtaaacagcgcggtcacggcgatagatgccaaaacgggcgaagtgaaaggccgtctggtgctggatgatcgtaagcgcacggaagaggtgcgcccgctgcaaccgcgtgagctggtagctgacgatgccacgaacaccgtttacatcagtggtattggtaaagagagcgtgatttgggtcgttgatggcgggaatatcaaactgaaaaccgccatccagaacaccggtaaaatgagtaccggtctggcgctggatagcgaaggcaaacgtctttacaccactaacgctgacggcgaattgattaccatcgacaccgccgacaataaaatcctcagccgtaaaaagctgctggatgacggcaaagagcacttctttatcaacattagccttgataccgccaggcagcgtgcatttatcaccgattctaaagccgcagaagtgttagtggtcgatacccgtaatggcaatattctggcgaaggttgcggcaccggaaagtctggctgtgctgtttaaccccgcgcgtaatgaagcctacgtaacgcatcgtcaggcaggtaaagtcagtgtgattgacgcgaaaagctataaagtggtgaaaacgttcgatacgccgactcatccaaacagcctggcgctgtctgccgatggcaaaacgctgtatgtcagtgtgaaacaaaaatccactaaacagcaggaagctacccagccagacgatgtgattcgtattgcgctgtaatagatatggcgagggtgaaaacggtgagacttgcctgccttttatcacggcgtatccggcactttcgtcagtaatctgaatttgcccggcacgtagccgggcaattttgcaattaactcgccgtttcaggcttaaacacaatttcctgtttttcttcatcttcctcgacgactggcgcagtgctgtgaatttcagcaacgcgtttgcgcacaccaaaccagcctataaccagcaaaataccgataatcggcagcgccgcgatagtataagtcccgttcgggtaatcgaacgccatcagcacaaggacactcagtaaaaacagtaatgtcagccaggaagtgaagggcgcgccaggcagtttaaaactgacatccgctgctttgccttctttaatcgctttacgcaggcgcatctggcacacgatgataaacgcccaactagcgatgattcccaggctcgcgaagttcaacacaatctcaaatacgcggctcggcaccagatagttgaggaatacgccgacgacatacacaactagtgtcgccagaatcccggcatacggcacatgctgacgactcattttcgccataaaactcggtgcggaaccgcccatcgccatactgcgcagaatacgtccggtgcagtacagaccactattcaggctggagagggcagcggtcagcaccacaatgttcataatgctgccgatatatggcacacccagtttagagaaaaacgtcacgaacggactttgccccgcctgatacgcgctccacggcaataacataaccagcaacaccacggagccgacgtaaaacaggccaatacgccaaatcacactgttaatggctttaggcaccatggtctgcggatctttacattctccggcagctgtacccaccatttcaatggaggcaaaagcaaacactacgccctgaatcaacaccagcgcaggcagcaaaccgtgggggaagaagccgccattatcggtgattaaatgaaagccagtggtgttgccatccagcggctgaccactaccgaggaacactgtacccacgaccaaaaaggtcacaatggcgagcactttaataagcgcaaaccagaactccatctccgcaaaccatttcacaccgatcatattcatggtgccaacgatggtaagtgcagcgagcgcaaagacccactgcggcacgccgccaaacgcaccccagtaatgcatatacagagcgacggcggtaatatcaacaatccccgtcatcgcccagttgatgaagtacatccagccagcaacataagcggctttctcacccaaaaactcacgggcataagaaacaaaactgccactggaagggcggtgtagcaccagctcacccaatgcacgcagaataaaaaagctaaacaagccacaaattaaataaaccagtgccagtgcgggccccgccatttgcagtcgggctcctgcacctaaaaacaagccggtgccaatcgcgccgccaatggcgatcatctgcacctggcgattgcccatcgctttgtgatacccctcttcgtgggcattaagccagcggcgtttcgcggcgtgttgatcactagtgtcggtgtcgtgtttactcattgctctccctgattgctttaatgaaaaagtcatataagttgccatgaacaatgtttattcatcctggcgatgatagttatcaccattattctttatgggtataaaactatcggcgcagcatcctacccgttatcgataaacgatgcaaaacatccccttacaatcctgaaggggattaatacaactgacgaaaaaatgacaaatccttttgctggttaacctgtgtactgtcctacacttaatctttaaaagattgtgaggggcatatgattaaggtgtatggcgtacccggatggggctctacaatcagtgagctgatgctaacactggctgatattccttatcagttcgttgatgtcagtggttttgaccacgagggagctagtcgcgagttattgaaaaccctgaacccgttgtgtcaggttccgacactggcattggaaaatgacgagattatgacggagacagcggcgattgcattgatggttctcgatcgtcgcccggaccttgcgccaccggttgggcgcgccgaacgtcagctgtttcaacggctattggtctggctggttgctaatgtctatccaacattcactttcgccgattaccctgagcgttgggctcctgacgcacctgaacagttaaagaagaatgttattgaatatcgaaaaagcctttatatctggttgaatagccagctcactgctgaaccttatgcgtttggtgagcaactaacgctggtggactgttatctttgcactatgcgcacatgggggcctgggcatgaatggtttcaggataatgccacgaatatcagtgcgattgctgatgctgtatgtcagttaccgaaattacaagaagtattaaaaaggaatgaaattatttgagtgggataccagaagattatgttatttattattcagtaactttatccacaatgatgggcgtaattaattaaattcatggtatgttttttaatttatatcactctccttttcattcagcgtgtctatttcatttcctctgaaaagaaactaactattcacatcgtgcagatgtttcagttgttaagtcaggcattctataatctcaaaatgtttttaatgatggatatgctcggagttggagatgcaattaatattaatacaaataaaaatatccggcaggtatgctaaaaggataaatggcgttctctgtatttattcgcaattatctgtaggacaaatatggagagcttgatgagtcagagctaaaacagcaattgattaataaacatgttgatttattcaagaaaatggatgtattttaaatgttgattcttaatataacctaatcaatagattatcaagtgagagctacacattattggaggggcaggggaaaacaccattttgggaacaatgcatcaggtactcttaccactgaagcaagatcatccggcaccaggtggtggtgcagtgctttggaaatggtcccctcgggggagttgtcattattttctatgctatttgcttattatattcatcaggtgaatttaataaattcctaatttgaaatatccactattaagctagtgtttaacgacgttaagatggcaatgtgcagatcatgttatcagggtggggcggtagcgtatattccttatacaaaccatcattcatttcaatgattgttattgaattatttattgttgtgaataaaaagacattatgaatattggtttgactttgcatatcaggttttttattactcgctgtaatgtacgagcctgtcgtgaataacgtcgagaacccatccgttgcgtttgtgattattttgttgactaaacagacacccgtttctctgaagtaaaatcccagactaaatcatcacataaccatgacatttttctgatattccccggtaacgccagataacgatgccaaatttaccgttatgttcaatcaactccctggtccatgtcgatttatctaccacaatcgccacgcgtggaggttcaaactccaccggcattgaccaggctgcagccataatgttacgccgctgggattgctcatcgaaactggtgatcaagaccgttgggccatgatttaacagacggctggcatggtgtaattctatggggatgaatcggctcatggtatcgcctcgcgaagaaggtttttttaagcgtagtccgtaacgcaataagtaacgaaattaacgggattggcgatttgcgaacgtgatgcatgtccgcgatcgcacaaaatagccggtgcggcgtctattccaggttataagttgagaaaaccactaagggaaacgcctgatgacgcccattctgaatcactattttgcccgtattaactggagcggagctgctgcggtcaatattgatacgcttcgtgcattgcacctgaaacacaattgcaccattccgtttgaaaacctcgacgttttgctgccgagggaaatacagcttgataatcaaagcccggaagagaaactggtgatagcccgtcgtggcggttactgttttgagcagaatggcgtgtttgagcgggtgttacgcgagctggggtttaacgttcgcagcttgttagggcgcgtagtgttaagtaatccgccagcattaccgccgcgcacccatcgtttgctgttggtggaactggaagaggaaaaatggattgctgatgtcggtttcggtgggcagacgctaaccgcgccgattcgtttagtttccgatctcgtgcagaccacgccacacggagagtatcggttgttgcaggagggtgatgattgggtgttgcagtttaatcatcatcagcattggcagagcatgtaccgttttgatctctgcgagcagcaacaaagcgattatgtgatgggcaatttctggagcgcgcactggccgcagagccattttcgccatcatttgctgatgtgccgccatttgccggacggcggcaagctgacactgaccaattttcattttacccattatgaaaatgggcacgcggtggagcagcgaaatctaccggatgtggcgagtttatatgctgtgatgcaagaacagtttggtctgggcgtggatgatgcgaaacatggctttaccgtggatgagttagcgctggtgatggcggcgtttgatacgcacccggaggcgggaaaataatttatgtcaggttgccggatgcggcgtaaacgccttatccggcatacattagcccggttgtagacctgacaggcgaagcgcatcagacaacggtttcagagttcaattgcccattcggcatgaaacaaaatcaccgctgtgccactaatggtgactttttccggttggttatcacgaattgtcaccgtcacttcaatcataccgtcacgccccaatgcgcgcccctgatggcctttaacacgcaacacgttgccatcgtggggcaatacgttgtgatgtaccaaccatgcacccatcgggccattggcattgccagtcaccggatcttccacaataccaatcgcagggctgaacatgcgaccatcggtttcgtttttgcctgggcggatctggaacgggaagaaaccattgcagccaatctttttgctgatagcggtcagcgcattaaggtcagggctaagggcgtcgatatccacttccggtttcagtgggatcatcactttactgtgtcctgttgttgccacctgaattggcaagcctggcagaatatcgtcctcagtgagatgaagcgcgttgataatcgccgcacgtgtttcaccttccagcggtggctcaaagcccggcgtaccttgttccaggctaatacgataatcatcgttgtgcttttcgatagtcacgcgatgttttcctgccaggcttgtttgccagatcgtgcaatttcctaaacctaacaccttcgcacgtacatagtgcgcagctactgtcgcgtgaccgcaaatcggcacttcaaccgttggcgtaaagtagcggatgcgcacatcgctgtcgtcgctgtgcagcagaaaagcagtttcgctatggcctaactcgcgggcgataagctgcatttgcgcttcgctaagattatcggcggggaaaacaacaccggcagaattgccgcgaaacggttgactggtaaaagcatcgacgtggtacacctgcggtttcattaacgttctcctgtgactggagaactatcatagcctgcaagtggccggagagcgaagggctatccggccagggtgaaattatcgccggctacgcacaatttgatatcgacgagtaaagtactcaaacggcgcgctccacacatgcaccagtcgggtgaacgggaagagcaggaagatggtcattcccaacaccagatgcaggcggaagacgaacgctacgccgttgagcatctcactgcttccaccacggaaagtgacaatgctttgcgcccaacccaccagcttcatcatttcgctaccatcaggatactgtgcactaaacggtatggtacttagccccaacagacactggatcagcaaaatgctcatgatgatgatatccggcgtagtggaagtggcacgcacgcgctgatttgtcagcctgcgccacagcagtcctgcgccgccaatcaacgtcaacacaccgcaaataccgccgagcaccatcgccatgagttgtttcgctgccactggcaaaaaccacgcgtacatccagtgcggcgttaacatgccgaacaagtgcccgaagaaaatccccaaaatgccgatatggaacagattgctccatatcaccatcccgcgtttatcgagcatttgactactggaggcgcgccaggtgtactgcccgtagtcgtagcgcagccagctgccgaggaaaaacaccgtcgcacaaatgtacgggtagatatcgtaaaaaaagacgttcagatactgaatcatttcccacctcccgcactgatgtcgacatattgcggcgcgacatcctggctaaagcgtcgctgatattgattaagcgggctgctgtcacacgccgtggcgttatcttcaataaacttcacctgttcctcttcccacactgcatcaagcgcctggcgggtgtcatcgcgctcttcgctgtttacttgttttgtgacactgtcactactaagggagcttcccgccagttgcagcagagcatcaaacaacgcgtaccacggtgcctcgcgttgttttaagcgaccgccaagcagggcgaggatcggcgcaacattgagcaatccttctttcgcctgatcgtcaggcagtacgcttaaatactccagatacagcggtagataatcgggcagttcccgacaatccagctgcaggccgaccttttcatactccgccagcaggtccaccattgcctggccgcgatcgcgggactcggcatgaacatgttcgaacagcagcaggctcgtggtgcgcccgcggtcaaacacttcgcaccattcggcctgtttatccagcagcggcgcgttaagcaggttgtgggtgaaatccgtaagcatcggcgcgtcgcggcggatcaacgccagcgcgtcctccttgcattcccacaacagctcgtccggatactccatcaacaggccgatcactttgaggatctgcattattcgccctccgctttgtcgcgcacttcggtgatgttgatggcatcgatacggctactgttgaacaggttgaatttactgtcgctaccgtggcaaccgtcgccaaaggtaaaaccgcagccgttgcgttctgcgaaggcatcgcccgccatttcccgatggctggtcgggataacaaaacgatcttcatagttggcaatggcgagatagcgatacatctcttcgacctgggcgacgctcaggcctacttcgtcgatggcacgagtatcagtaacgccttccacggtttgactacgcatatagtggcgcatcgccatcatccgtttcagcgcccgcagtaccggaccggtatcgccggcactcaacatattggcgagatattgcaccggaatacgcaggctttcgatggcgggcagcacgccttcgcttttcggcaaaccgcccgcatctgcgtaggactgaatcggactcagcggaggaacgtaccagaccatcggcagggtgcggtattcagggtgcaacggtagtgccagtttccagtccatcgccattttgtagactgggctacgctgggcagcgtcaatcacattttgtggaataccttgtttcagggcttcctcgatcacactgggatcgtgtggatcgaggaacacttcgcactggcgttcatagaggtcaacttcgcgctcggtgctcgccgcttcctcgatgcggtcggcgtcgtaaagcagcacgcccagataccggatgcgacccacgcaggtttcactgcacacggtcggttgaccggactcaattcgtgggtaacagaagatgcatttttcactcttgccgcttttccagttgaagtagatttttttgtacggacaaccgcttatgcacaaacgccagccacggcatttatcctgatcaatcagcacaatgccgtcttcttcgcgtttgtagatagcgccgcttgggcaggtcgccacgcagctgggattgaggcagtgttcgcacaggcgcggcaggtacatcatgaaggtgttttcaaactgcccgtacatctccttttgcatggcctcgaagttgcggtcgcgggcacgtttttcgaactcaccgcccagcagttcttcccagtttggcccccagatcactttgtccatccgtttgccgtcaatcagactacgcgggcgagcagtaggaatatgtttgccttccggtgcgctatgcaaatgttcgtagtcgaaggtgaaaggttcgtagtaatcatcaatctgcggcaccaccgggttggcgaagattttggttattacgcccatcttgttgcccagacgcgggcgtatcttgccattcacatcacgcacccagccgccttgccactcttcctgatcttcccagtttttcggataaccaatgcccggtttggtttcgacgttgttaaaccatgcgtactccatgccttcgcgcccggtccagacgtttttacaggtcacgctacaggtatggcagccgatacatttgtcgaggttaagcaccatgccgacttgactacggattttcattttttcgcctcctgtacctgatcgcgaccttcatcatccagccagttaacgttcttcatcttgcggatcatgatgaactcatcgcggttgcttccgacggtgccgtagtagttaaagccccaggccagctgcgcgtaaccgccaatcatatgcgttggtttcgggcaaacgcgggtaacgctgttatgaatgccgccgcgcatgccagttacttcgctaccaggaatattcataatgcgttcctgggcgtgatacatcatggtcatgcccggcggtacacgttggctgaccaccgcgcgggcagtcagcgcgccgttggcgttgaatacttccacccagtcgttatcgacaatggtcagttctcgggcatctgtttcgctgatccagacaatcggtccaccgcgagagagcgtcagcattagcaggttttcactgtaggtactgtgaatgccccatttctggtgcggcgtcaggaagttaagtgctttttccgggaagccgtttggcggtatctggcgcatctcactgacgctacgggtgtcgataggcgggcgataagccaccaggctttcaccaaaagcacgcatccacggatgatcctgatagagctgctggcgtccgctcagcgtgcgccacggaattaactcatgaacgttggtgtatcccgcgttataggagacgtgatcgctttccagaccggaccaggtggggctggagataattttacgcggctgcgcctgaatatcgcgaaagcgaatcttctcgtcctctttgtgcagcgccagatgggtatgttcgcgcccggtgatctcgcccagcgcctgccacgctttgactgcaacatgaccgttggtttccggtgccagtgccagaatcacttcactagcgtcaatggcggtgtcaatcagcggacgcccctgtgccgggccatcacgcttggtgtaattgagtttgccgaggaaatcgatttcatcctgggtattccagctaatccctttaccgccattgccaagtttgtccatcaatggcccgaggctggtaaagcgttcatacgtagcagggtagtcgcgctccaccgccacaatattcggcgcggttttgcctggaatcagatcgcattcgcctttgcgccagtcgagcacttcacacggctgactgagctctgccggagagtcatgcagtaggggttgtaataccacgtcggtttctttgccaagatgacccacgcacacttggctaaatgctttggcgatacctttgtagatttcccagtcgctgcgactttcccacgccggatcgaccgccgcagaaagcggatgaataaacggatgcatatcgctggtgttcatatcgtctttttcgtaccaggtggcggtgggcagaacgatatcggagaacaggcaggtactggacatgcggaagtcgagcgtcaccagcaggtcgagcttgccttcaatcgctgcagtttgccactcgacttcttccggtttgatcccgtcgctggcaccgagttcctcgccctgaatcccgctttcggtccccagcagatacttctgcatatactcgtggcctttgccggaggagccaagcaggttagagcgccagacaaacaaattacgcggatgattgctgctgctatctggttgttcgcaggccatacgtaaatcgccgcttttcagcgcctgggcggtaaattctgtgggggataatccggccttgtcggcttcagctttaatcccgagcgggttacgccccagctgcggcgcagaaggtagccagcccatacgttcggcgcgaacgttgaaatcaatcagatgaccgctgtacttactggcatcggcgagcggactaagtaactcctgagcagagactttttcatagcgccattggctggaatgattgtagaaaaagctggtgctgttcatttggcgcggtggtcggttccagtcgagcgcaaaggccagtggcaaccagccggtttgtgggcgcagtttttcctggccgacatagtgtgcccagccgccaccgctttgcccgacacaaccgcagaagatcagcatattgatcatcccgcggtagttcatgtccatgtgataccagtggttaacacctgcgccgaggataatcatgctgcgcccatgcgttttatgggcggtatcggcaaattcacgggcgatggtttcaatatactggcgcggcacgccggtaatttgctcaccccaggctggggtgtacggtttgatttcagcgtaatctttcgcactgttttcatcttccagcccgcgatcgaggccgtaattcgccagtaccaaatcataaacgctgaccaccggacaggtgttgccatcgactaacgtcaggtttttaacgggcaattggcgcaccagcaccggattgtgttttacgctgcgaaaatgcggattttcaatgccgccaaagtaggggaaggccacgcctgcaacagcgtcatgttgaccgagcagggttaagctcaattcggtttccgtaccggcggcaatggattccagattccatttgcctttttctccccagcggaaaccaatgctaccgttcggcactaccaattcacctgcggtattaactgctacggttttccactgcggattgttgctttcgcccagtccatccaccaggtcagatgcgcggatcatgcgcccgggaacgtagctaccatcgtcgcgaggctccagcattaccagcatcggcatgtcgctgtagcggcggcagtagttgataaagtagtcgctgggattatcgagatgaaactcttttaaaatcacatggcccattgccatcgccagggcgctatcagtgccttgtttcggtgccagccactggtcgcacaatttggccacttcagagtagtcaggggtaatggcgatggttttagtgcctttgtagcgtacttcggtaaagaagtgggcgtccggcgtacgtgtctgcggtacgttagacccccaggcgatgatgtagctggagttataccagtcggcagattccggtacgtcggtttgctcgccccaggtcatcgggctggcgggcggcaggtcgcaataccagtcgtagaaacttaaacaggtgccgccaagcaggctcagataacgcgttccggcggcgtaagaaaccatgctcatcgccgggatcgggctgaaaccggcaacgcgatccgggccgtaggttttgatggtccagacgttagcggcggcaatcagctggtttagttcctgccagttggagcggataaacccgccgcgcccacgcacttgtttgtagctcaggcacttttgcggatcgttcataatgcttgcccacgccagtaccggatcgctgtgttgcttgagggcttcgcgccacagttcaatcagtcgtttacgaatgagcgggtatttcaggcggttagcgctgtaaagataccaggagtaacttgcgccacgcgggcagccgcgaggttcatgattgggcaggtcagggcgagtgcgcgggtagtcggtctgttggatttcccaggtcaccagaccatttttaacgtagattttccagctacaggagcctgtacagttaacaccgtgggtggaacgcacgattttgtcgaactgccaacgctggcgatagctgtcctcccagtcgcggttgctatgcatcacctgtccgtgaccatcggcaaaggtttcgcccttttgtttgaagtagcgaaagcgatccaaaagtttactcatgacatgactcctgctccaggaatgaattgggatctgatgccttgtcggatgcgacacggttgtacatcaggcatcgatctcttatttttggctgaacttccgccgaccataaaccagccaggtcagcagcacacaaacgatgtagaagattaaaaacactttcatcgcgccgaccggagagccggtcatattgaggctcatgccaaacgcctgcggaataaaaaagccgcccactgcgccaatggcactgataaagcccagagccgccgccgtttcggtgacggcttcttcatgagcttgctcatcactaccgcctttcatctttacccgataaatggttatctggcgaaagatgacggcgatcatctggaaagtagaaccacttcccagacccgcagtcagaaacagccccataaatacggcgtaaaaggcgatgaaattaccggagcctgtgcccggtaaggtaaggaacagcagggcactgaaaatcgccataaaaataaagttgatcaacgtcacccgcacgccgccgaacttatcggaaatagcaccaccaacgctccgcgcgatggcaccgataaatgggccaaagaacgccaggcgcagaatattcacatccgggaactgggtttttgccagcatggcaaaacccgcagaaaaaccgataaagctaccgaaggtggcaaggtaaagcaggctcagcagccagagatgcaggcgttgtaagacagggagctggtcggcaatactggcgcgactactggcgatatcattcatcccactccatgcggcgatcgtggcaatcgccagtagcggtacccaaatccatgcggcattcgccaggctcatcacgctaccgtcggcctgcggtacgccattgacgccgagaaaggcaaatacaggtacaaaaatgaccagcggtgcaaccagctgcattacacttacacctaagtttcctaatccgccattaatcccaagagcgctcccttgtttggcttttggaaagaagaaactgatattgcccatgctgctagcaaagtttgcacctgcaaaaccgcatagcaaagcgataacgataaatatcccaaaaggagtattcggattttgcacggcaattccgagccagacgcaaggaataatcaggattgcagtactaaaaaccgtccatcggcgtccaccgaatataggcaccataaaggagtagggaacacgcaataatgcgccagaaacggagggtaatgcggttaataaaaagagttgatcggtagtaaaattaaaaccgattttattgagattaacggtaactgcgctaaatagcatccagacacagaaggcaagaagtagacaactgacacttatccagagatttcttcgagcaatatgttttcctttattttcccagaaggccggattttctggtttccagtcgcgcaaaagataacgactatttttctcattttgcagtgccatattgttcctcacatgcacacattggtaatgaaaaaaagacaaaacacgaggtaaggcgcaatagccagttattagaattaaggatgaattgggtgaagtgctgattgaaagaatagataagaaagcgtaaccgcgggggcagaatggggattaagtagccagatatgtgttactaaatgtaactaacaagctaaccttcaaacggggttaatctttgaacgtatgtcatgtttcaacccttcagatcgtgaatctaaagggttacatattaactatattatcaacaagaccagacacttatagaattagtgatgatttattcattaaaaaggccaactactggaggaaaagcttctgtccagaaggtctatcggttcctctcttattgcctgattgtaataatcgttattacagtaagtattgtttatttcatctaaggtcatgtttttaacttttatattcatctggtttacaacttcctctgtcttgtaagtgtgtatattatatggggtatatgcttttttaataggatagtgaaacaattcgttatccacatctattccgtcagagtgaacttcaaatgcaccagggctaagaattgccaggccagtattaagcttaagtgctggggaaaacaaattaaataacatgagctgcatagtagggcaattgttcttcccagaaacatttaaaaaatttaagttttgctctgttttattatggggaataaagttccaatatcggatgtattattagtatcaatgtgggttattttattattgtccagtcttaaacttttgatagatggaagataagtcaggaaatcaagatttatatatttcaactggttgttagcagcgtttaatgtctgaacattgcagaagttgctatagaatattttaatttcagaaagcaaattgttgttaataagtaacgtattcaagttgggaaataagtcattgtgtaaacttgttagtttattatgggatagatccagcagtaagagttcatttttattacctgcaacaatatcagttaattgattatggctgagattcaggtattgcagccattcgcaagattctaattgcacaaactctagttgattatgtgccgcactaaaataagtaacactactaagcctatctatatcaatatttctgagagcattattattcatagatatatgtgtaatacttacatttctgccttgaggaaaatttatactctcaagagcattactattcagacttagctttacgagtctatcgtagttggttgcatcaaaatgtgtgaattggttattatcaagattgatagatgtgaagttttgcagccctggtggttgagtggttaaattaagtccacttaaatcaatggtcacttcattagtgtcatcaattatatttcttactgcagtccagtactgcatttgtgcaagtggatcattgttgatgccgttaactaatacatgccaaagatgtttactacttattagttgatcaatgtcattggttggcagtaaattgttattgcttaagtttaaatattccagttttgtagtgtttttggcgtttaaatgtgcaatatggttgtcgtttaaagtgattgttttcatcctgggatgattgtgtaatataaggtcagtgatcatattgtgatgggcacttaactcaatcagagattcttgccgcggctgccgttggcttcatcgttatagcctttaaaatcatattcccagtgaccaaaaccaatcatttgatcattgatttgcgtttctcctttaaagccgagacgggcataagttttatcaccatcgtcacgcttatcatcagtaaaataacgtagagcggtaaccttgccataaaggtcgagtttattaccatccttgttatagacttcggcagcgtgtgctacgttcgcagctaacaaaccagttacaaccaccgcaactatttttaatttcatttaacagaatccttttaattatcgttaaacgtattttctaaacgaattttaaacggcgtcatttataaatgacatactgtttttaaaatagaatggtgattaaaaacaatgagaaaaatagatgaaataatattatttatcgatatgtgatcgaagtcgaaatgagatataaggtgaattactggtatttgaaatttatttttttaatattgtcggaatttatctgattaactaccgggccgtagacccggcagttattttaaccacgacgtgtcgccagccagcagagcagggaaccgccgcagaccatcagcgcgccttgccagaagctgaagctcagcggggcgctgagcagcacggctgcaagcgcactggaaagtacaggcgtaaaatagctacctaccgccataatggtgacattgccatgcaatataccgacattccatgcagcataagcaaatcctaaggtaaatgccgcagagatgagtttaatcatgacgggcgtgctaaatatcatttctggttgtggcgtaagaaaatagtaaacccacagacttgctcccgttagcaggacaaaaacggtaattccattaaatccgcgtgcgtatttattcgttactgtgcaataggctgcccagataaacgcaccaatgaacgccaggaaataactcaatgggctggtggtgatattattgatgatttcatcataatgtaacccattgtcaccgcctaacacccaacagacgccgacgagggctaataataatccaggtacaatcaaccagttggttttctgaccattaaacagaatggcaaagagaattgtcaggctgggccacagatagttcaccatacccacttcaatcgcctgatgatgggtcgccgcataccctaaggaaagcgccagacagatttcatagctgacgaataacagactcccggcgagtaaatagcctttcgggatttgccgaatacgcggaaatccaaccgtgaagattaacagcagcccgcttaaactatagatagcagctgcgccgccgaccgggccgagcccctcactgacaccgcgaatcaatcctaccatcgtgctccacaggacgatcgctatcagccctatgagcgttgctttttgtcgtgtcatgctcgctgttttgtctctcttgccgttaaaaattaagctgaattttatagcatttttttaactggcctgtcaggcagtggtgcgtttttctaccgctattgaggtaggtcaatttgcgaaggcggattattttgtggcaaacagatgttctttttgatttcgcgcaaaaagattcagaattttactgttagtttcctcgcgcagtaatacccctgaaaaaagaggaaagcaatggacgtcagtcgcagacaattttttaaaatctgcgcgggcggtatggctggaacaacagtagcggcattgggctttgccccgaagcaagcactggctcaggcgcgaaactacaaattattacgcgctaaagagatccgtaacacctgcacatactgttccgtaggttgcgggctattgatgtatagcctgggtgatggcgcaaaaaacgccagagaagcgatttatcacattgaaggtgacccggatcatccggtaagccgtggtgcgctgtgcccgaaaggggccggtttgctggattacgtcaacagtgaaaaccgtctgcgctacccggaatatcgtgcgccaggttctgacaaatggcagcgcattagctgggaagaagcattctcccgtattgcgaagctgatgaaagctgaccgtgacgctaactttattgaaaagaacgagcagggcgtaacggtaaaccgttggctttctaccggtatgctgtgtgcctccggtgccagcaacgaaaccgggatgctgacccagaaatttgcccgctccctcgggatgctggcggtagacaaccaggcgcgcgtctgacacggaccaacggtagcaagtcttgctccaacatttggtcgcggtgcgatgaccaaccactgggtggatatcaaaaacgctaacgtcgtgatggtgatgggcggtaacgctgctgaagcgcatcccgtcggtttccgctgggcgatggaagcgaaaaacaacaacgacgcaaccttgatcgttgtcgatccccgttttacgcgtaccgcttctgtggcggatatttacgcgcctattcgttccggtacggacattacgttcctgtctggcgttttgcgctacctgatcgaaaacaacaaaatcaacgccgaatacgttaagcattacaccaacgccagcctgctggtgcgtgatgattttgctttcgaagacggtctgttcagcggctacgacgctgaaaaacgtcaatacgataaaagctcctggaactatcagctcgatgaaaacggctatgcgaaacgcgatgaaacactgactcatccgcgctgtgtgtggaacctgctgaaagagcacgtttcccgctacacgccggacgtcgttgaaaacatctgcggtacgccaaaagccgacttcctgaaagtgtgtgaagtgctggcctccaccagcgcaccggatcgcacaaccaccttcctgtacgcgctgggctggacgcagcacactgtgggtgcgcagaacatccgtactatggcgatgatccagttgctgctcggtaacatgggtatggccggtggcggcgtgaacgcattgcgtggtcactccaacattcagggcttgactgacttaggcctgctctctaccagcctgccaggttatctgacgctgccgagtgaaaaacaggttgatttgcagagctatctggaagcgaacacgccgaaagcgacgctggctgatcaggtgaactactggagcaactatccgaagttcttcgttagcctgatgaaatctttctatggcgatgccgcgcagaaagagaacaactggggctatgactggctgccgaagtgggaccagacctacgacgtcatcaagtatttcaacatgatggatgaaggcaaagtcaccggttatttctgccagggctttaacccggttgcgtccttcccggacaaaaacaaagtggtgagctgcctgagcaagctgaagtacatggtggttatcgatccgctggtgactgaaacctctaccttctggcagaaccacggtgagagcaacgatgtcgatccggcgtctattcagactgaagtattccgtctgcctagcacctgctttgctgaagaagatggttctatcgctaactccggtcgctggttgcagtggcactggaaaggtcaggacgcgccgggcgaagcgcgtaacgacggtgaaattctggcgggtatctaccatcatctgcgcgagctgtaccagtccgaaggtggtaaaggcgtagaaccgctgatgaagatgagctggaactacaagcagccgcacgaaccgcaatctgacgaagtggctaaagagaacaacggctacgcgctggaagatctctatgacgctaatggcgtgcttattgcgaagaaaggtcagttgctgagtagctttgcgcatctgcgtgatgacggtacaaccgcatcttcttgctggatctacaccggtagctggacagagcagggcaaccagatggctaaccgcgataactccgacccgtccggtctggggaatacgctgggatgggcctgggcgtggccgctcaaccgtcgcgtgctgtacaaccgtgctagcgcggatatcaacggtaaaccgtgggatccgaaacggatgctgatccagtggaacggcagcaagtggacgggtaacgatattcctgacttcggcaatgccgcaccgggtacgccaaccgggccgtttatcatgcagccggaagggatgggacgcctgtttgccatcaacaaaatggcggaaggtccgttcccggaacactacgagccgattgaaacgccgctgggcactaacccgctgcatccgaacgtggtgtctaacccggttgttcgtctgtatgaacaagacgcgctgcggatgggtaaaaaagagcagttcccgtatgtgggtacgacctatcgtctgaccgagcacttccacacctggaccaagcacgcattgctcaacgcaattgctcagccggaacagtttgtggaaatcagcgaaacgctggcggcggcgaaaggcattaataatggcgatcgtgtcactgtctccagcaagcgtggctttatccgcgcggtggctgtggtaacgcgtcgtctgaaaccgctgaatgtaaatggtcagcaggttgaaacggtgggtattccaatccactggggctttgagggtgtcgcgcgtaaaggttatatcgctaacactctgacgccgaatgtcggtgatgcaaacagccaaacgccggaatataaagcgttcttagtcaacatcgagaaggcgtaagggggcgaacagatggctatggaaacgcaggacattatcaaaaggtccgcaactaactccatcacgccgccttctcaggtgcgtgattacaaagcagaagtcgcaaaacttatcgacgtttccacctgtatcggctgtaaagcctgtcaggtggcgtgtagcgagtggaacgacatccgtgatgaagtggggcactgcgtcggggtttacgataaccccgccgatctgagcgccaagtcctggacggtgatgcgctttagcgaaaccgaacagaacggcaagctggagtggctgatccgtaaagacggctgtatgcactgtgaagatcccggctgcctgaaggcgtgcccgtctgctggtgcaatcattcagtacgctaacgggattgtcgatttccagagcgaaaactgcatcggctgtggttactgcattgccgggtgtccgtttaatattccgcgcctcaacaaagaggataaccgggtatataaatgcacgctctgcgtcgatcgcgtcagcgtcggccaggaaccggcttgtgtgaaaacctgtccgaccggggctatccacttcggcaccaagaaggagatgctggagctggcggaacagcgcgtggcgaaactgaaagcgcgtggttacgaacatgctggcgtctacaacccggaaggggtcggtggtacgcacgttatgtacgtgctgcatcacgccgatcagccggagctgtatcacggtctgccgaaagatccgaagatcgacaccagcgtaagcctgtggaaaggcgcgttgaaaccgctggcagcggctggctttattgccacttttgccgggttgattttccactacatcggtattggcccgaataaggaagtggacgatgacgaggaggatcatcatgagtaagagcaaaatgattgtgcgcaccaaatttattgatcgcgcctgtcactggaccgtggtgatttgcttcttcctggtggcgctgtccgggattagcttcttcttcccgacgctgcaatggctgacgcaaaccttcggtacgccgcagatgggacgcattttgcacccgttcttcggcattgcgattttcgtcgcactgatgtttatgtttgtgcgttttgtgcatcacaacatcccggataagaaagatattccgtggctgttgaacattgtcgaagtattgaaaggcaatgagcataaagtggcggatgtcggtaagtacaacgccgggcaaaagatgatgttctggagcatcatgagcatgattttcgtgctgctggtgaccggggtgattatctggcgtccgtactttgcgcagtacttcccgatgcaggttgttcgctacagcctgctgatccacgcggctgcgggtatcatcctgatccacgccatcctgatccatatgtatatggcattttgggtgaaaggaagcattaaagggatgatcgaagggaaggtaagtcgtcgctgggcgaagaaacaccatccgcgctggtatcgtgaaatcgagaaggcagaagcgaaaaaagagagtgaagaagggatataatctcttttgaactttaagctgaaaatggcgctgtaaaaggcgccattttcatattgtagacaacgtaggctttgttcatgccggatgcggcgtgaacgccttatccggcatgaaaacccttcaaatccaatagattgcagtgaacgtgtaggcctgataagcgtagcgcatcaggcaatgttgcgtttgtcatcagtttcaaatggcgctgtaaaaggcgtcattttcatattgtagacaacgtaggctttgttcatgccggatgcggcgtgaacgccttatccggcatgaaaacccttcaaatccaatagattgcagtgaacgtgtaggcctgataagcgtagcgcatcaggcaatgttgcgtttgtcatcagttctaaatggcgctttataaagtgccatttttttattgcgtaaccagacggcgtaatcggctcacatccactgttttttctgcctctgccagactccaggcgttttgcagattcagccacatttgcgggctactgccgatcaccacggaaagtttaatcgccatttctggcgtcaaagctgcttttcctgtcagcaatcggcttgccgtactgggagcaatttccattgctctggcaaactcgcgcaggctgacattaagttcgtccagactttcctgaataatgtcccccgggcggggatgattggccattttcattagtgtctttactctcagtagcgttccttcactgggaacactatcattattgttccttcctacgcaacaataatccatttagccatttcatgttggagagtgtgcgatgctgcgacccgaacatggcagtcgcagcaaaggcctcttagtgacggaaatcaatcaccatgcggccacggattttgccttcttccatctcagtaaagatggtgttgatgtccgctaacggacgcagggcgactttcggcaccactttaccttcggcggcaaactggaaggcttcagttaaatcctggcgcgtgccgaccaggctaccgaccacttcaataccatccagcacaagacgtgggatatccaggctcatagactccggcggtagaccgacagccacaacacgaccgcctgcacggacagcatcaactgcgctgttaaacgcagctttagctaccgctgttaccaccgcagcgtgagcgccaccagttttctcctgcacaattttggcggcgtcttcggtgtgactgttaatcgctaaatctgcgcccatttcggttgccagttttaactgctcatcattgacatcaatggcgatcactttggcgttaaagacattcttcgcgtattgcagggcgaggttacccagaccgccaagaccgtagatagcaatccactgccctggacgaattttactcagcttaacggctttgtaggtggtgactcccgcacaggtaatgctgctggccgccgcgctgtccagaccatctggcacttttaccgcgtaatcggcgaccacgatgcactcttccgccatcccgccatcaacgctgtatccggcatttttaacactacggcagagcgtttcgttaccactgttacagtattcgcaatgaccgcatccttcgtagaaccacgccacgctggcacgatcgcctggttttaaactggtgacacctggacccacttctgccaccacaccgatgccttcatggcccagaattacgccggttttgtcaccaaaatcgccattcttaacatgaagatcggtatgacatacaccacaacactccattttcagcagggcttcgccatgtttcagactgcgcagtgttttatacgtaacgtcaacatgatgatccttcgtaacaactgcagccttcatagttcctccttttcggatgatgttctgcatagcaggtgaggcaaatgagatttattcgccactacccagtatggatgagatctgaaaaagggagagggaaatagcccggtagccttcactaccgggcgcaggcttagatggaggtacggcggtagtcgcggtattcggcttgccagaaattatcgtcaatggcctgttgcagggcttcggcagaggttttcaccgccacgccttgctgctgcgccattttgccaaccgcaaacgcaattgcgcgggagactttctgaatatctttcagttccggcagtaccataccttcgccgttcagcaccaatggactatactgcgccagcgtttcacttgcgctcatcagcatctcatcggtgatacgactcgcgccggaagcaataacacccaggccgatgcccgggaaaataaaggcgttgttacactgggcgatagggtagattttatctttccataccactggattaaacgggctgcccgtggcgaccagcgcgttaccttcggtccaggcgataatgtcctgcggtgtggcttccacgcgactcgtcgggttagacagcggcatcacgatcggacgcggacagtgtttatgcatctcacggatgatctcttccgtaaacagcccggtctgtccactgacgccaatcagaatatctggttttacattgcgcaccacatccagcagactcagcacatcgctgtcggtatcccagtcactgaggttttcgcgcttctgcaccagtttggtctggaaaggcagcaggttcggcatcttgtcagtcagcaagccaaagcgatcgaccataaagactttctgccgcgccgcttcctcgcttaatccttcgcgctgggtctgggagatgatcatttcggcaatgccgcatcccgcactacctgcgccaaggaagacgatttttttctcgcttaactgaccacctgccgcgcggcttgctgcgatcagtgtgccgactgttaccgccgcagtgccctgaatgtcatcgttaaaagaacaaatttcattgcgatagcggttaagtaacggcatcgcatttttttgagcaaagtcttcaaactgcaacagcacgtctggccagcgttgtttcacagcctggataaattcatcaacgaattcatagtattcgtcgtcagtgatacgcggattacgccagcccatatacagcggatcgttaagcagctgttggttgttcgttccgacatccagcaccaccggaagggtatacgccgggctgatgccgccacaggcggtatagaggctcagtttaccgatcggaatgcccatcccgccgatgccctggtcaccaagccccagaatgcgttcaccgtcagtcaccacaatcactttaatattatggttcggcacgttttgcagaatatcgtccatattgtgccggttctggtaagagataaacacgccgcgactacggcggtagatctcagaaaaacgctcacaggctgcgccgacggttggggtataaataacaggcatcatctcatcaagatgattgtttaccagacggtagaagagggtttcgttagtgtcctggatgttacgcaggtagatgtgtttgtcgatttcggttttgaatccctgatactggatccatgctcgttccgcttgttcttcgatggtttcgaccacttccggcagtaaccccagcaggttgaagttacggcgttcttccatgctgaaggcactgcctttattcaacaacggaaattccagcagtacagggccagcgtaagggatataaaggctacgctgtttttttgtttttggttccatgtcactcactcttttttgaatatccatccctggggggcttttatcgtctttgctttaccgccagggcgtcggcctcaagtataaagcagataaaaacaaaaacaccattgcgcaggcaatggtgtttaatcgtcattgaggactgatggttatgaattacttttcagcggggcgttttctgccggttgggttatttactacgctggatttgtcaccttcggtaactattttgcgctggttagaaattttatggtccagtccaagaatatgacgtgcctgacggttgcttttcattttaactcctcaatcctgtagctagttttaaggacaacatcgccgtagcgaagaaacacgtgctaaacccctaaattaggttgccgatcaagcatagcaccttaaagcgtagggtgctggccactgaccacataattgatcgtttgctggtagatatcactgaggatgtcgttatcagaagcttcaacccatttggtcagctccatgagaatgtcatcttcagtgacaacaccatgctgtgcccgaaggccttgctcaatggcattaaccagagcgggttctgctgtactattttctgcctgataataagtaaacatagtgattctccgtgtctgtgtatttatggtgtctgctacggatcgcagatttataaagcacattcagcatggcaaatatttgccgcttcgttgttaagattagtcctggttgatgatttttatattttaacaccatgatattcatagggattgtgattggtatgatccgattaatattgatacaatatcttttgggttatatattcccggtaatctattgtgggaatttaatttaagtgcagaagtaatattttcgccggattttattcggaatatcctgcttatcctcgtgctgtttctcacgtagtctataatttcctttttaagcccacaggagagcaacaatgacaatccataagaaaggtcaggcacactgggaaggcgatatcaaacgcgggaagggaacagtatccaccgagagtggcgtgctgaaccaacagccgtatggatttaacacgcgttttgaaggcgaaaaaggaaccaaccctgaagaactgattggcgcagcgcatgccgcatgtttcagtatggcgcttagtttaatgctgggggaagcgggattcacgccaacaagcattgataccaccgccgatgtgagcctggataaagtggatgccggttttgcgattacgaaaatcgcactgaagagtgaagttgcggtgccgggtattgatgcctctacctttgacggcataatccagaaagcaaaagcaggatgcccggtctctcaggtactgaaagcggaaattacgctggattaccagttgaaaagctaaagcattgccggatgacgcgtcaggcgcgtgaatgcctgatgcgttgttagcatctttacagcgcccgccagcaccggagctcacgtccgtcctcccttattgctaaactttgccggacttcacatccgtgggttgccagcgggcaacgttcgtagaaaaaacagccttgcggcaacgtgcggtttcccggcagatccgttttacgtaatgcccattcttcctccagcggtttatcaatggcggggagggaatccagcaataatcgggtgtatggatgtgcaggtgccgtcagcacctgctgcgcgtcgcccagttctacaatctgcccgagatacatcaccgccacccgatcgctcatatgacgtatcacgctgacattgtgactaatcagcacataggtcagcccgtgattttcctgtagcgttaccagtaaattgaggatctgcgcctgaacggagatatccagcgcagaggttggctcatcaagcacaatcacgtcaggctggctagagagtgctctggcaatggcgatacgttgccgctgcccgccggagaacgcatgaggcaggcggtcgagatactccggacgaatacccacctgcacagccaactcctctgccaacgctcgccgctgttgttcactactacgcttagctatccagagcggttctgtgatgatgcgccacaccggtaagcgcggattaaggctagagagcgggtcctgaaacaccatctgcataatgcgttgactgccagaacggatgtactgcccgtggctcggttgcagcatacccattaaaagctgtgcgagggtgcttttgccgcagccactctcgccgacgatccctaaggtttcaccacggcggatctgtaaatcaataccattaatggcatgaacatgttccgtagttttaccaagccagtttttacgggccgggaaattgatatggacgtcgcgtaacgttaataacgtgtcagacacttataacctcctgctgcggataccaacaggcacagcgctggttgttgtcaccacacgctgtcagcgccgggacgttttcacactgtgcacctgccgcatagcaacgatcgcgaaaagcgcagccgtcaggcaaatgggtgaggtttggtaccgtccctggaatggcgggtaatagctggcgtggtactccatgttctggtgcgcattgcagcaaaccaatggtatacggatgccggggatgatggataacgtctgccgtcacgccgctttcaattacgcttccggcatacatcacgtaaacgctatcgcacagttggctcaccacggccatatcatggctgatgaacagaaccgcagttccactggcgcgggctttatgtttaagcaaacgcagtacctgcaactgcaccgtgacgtccagcgccgtagtcggttcgtcggcaataatcaattgcggctcgcaggagaatgccagcgcaatcattacccgctggcgcataccaccactaagctcaaacggatagcggctcataacttccacggcatccgggatttgcatctcttccagcaggtcaatcgctttagctctggcttcccgacgacttattggttgatgatggcggatcacgtccatcatctgaagacctattcgacgtgtcggattgaggtcggtcatcggttcctgaaagatcatcgccactcgtgcgccgcgccactgacgaagctgtttttcccgcgcgttaagaacatcttctcccagcagggaaatctgcccccgatgtacgcaataactgcccgtcggtagcagacgcataatcagcattgcggtgacacttttaccactgccggattctcccaccagaccgacaatttcaccgcggttaatctgcaaggacacattgttgagcgcgtgaacatcaccgttaaaaccggggaaactcaaatgcagttgttgaatgtccagaacgggttgggtcatgactgctttcctcctgctttttagttcaactctgctttcctcctgctttcgggtcaagcagatcgcgaataccatcaccaaagagattaaacccgacggcggtaagcaaaatcgctgcccccggaaatgcgcaataccaccactgatcgagtacatagttgcgaccatttgctaccatcgcgccccattcagcactcggttgttgagcacccaggccaataaatcccaacgtggcggccattaaaatcgcgctaccgatatccaggcttgcctgcacgatcagcggcggtagggagttacgtaaaatatgccagttgatcagatgccaacgagacgcgccaaaggttttcgccgcctgaacataggtatactggcgtacaactaatgcttgcccccgcgccaggcgcacataaaagggaattcgcacaatagcaatagccagcatggcgttaaacaaactcggcccgagagcggcagccagtgccattgtcagtaccaagctaggaatgctcagcataatgtccatgatgcgcatgatgatggcgtctgcgcgtccaccaagcacaccggatagacatccgagtaggctaccaatcatacccgcaatggcaaccacgactaatccggcgagaatactttgctgactgccgaccagtacgcggctaaacagatcgcgtcccacttcatcggtgccaaaccagtgcgccgcagaaggcggcaaaaggcgggcggttaaatcaatggcgttgggatcatgcgtcgccagccacggactaaaaatcatcatcaatagcattaatacaatgatgactgcgctggtcacggtgagcggactgcctttcagcatccataccagttttgcaccgttaaatcgcgtttgtttttgtgggcgtacggcggacgtttcctcgcttagcatcattcaccacctccacgtccgatacgcggatcaatccacaaatagagcaaatccaccaccaggttgaccagcacataagcaaaactaaccacgacggcaaagcccatcactgccgggaagtcgagcgcctgtatacttgttactacccatgcacccattccgggccaggcaaaaacggtttcggtgagcactgcgccatacaacaaatcgcccagcgccaaacccaatacggtaatgcttgggatcaacgcattgggtagcgcataacataaaacgatataccagccgggcaagccgctggcccgggcggtacgaatgtagtcttcactcaattgttccagcatcgcactgcggatctggcgagcgacaattcccaggtgaacgaacgccagcgttaatgccggtaagatgagatgttgcaacgcattgaagaagacttcaccgttgccttcaagcagcgcatcgagcagataaaagccggtaacgtgcgttggtggatccagccagtcatcaagccttccgccgccgggaagaatttgcagatgaccataaaacagcacaatgacgcccagcccaagccagaacgcaggtgtggagattccggtaatggccattattcgcaccagatgatccagccagcgatttcgccagactgcagagagtatgcccagcgggatgccaatcaggagtgccagcagcagggcaccaaaagccagctccagcgtcgccgggaaaaatatacgcaactcttccagcaccggacgcccggtacgaatggatgttcccaggtcaccatgaaacaggtcgctgacgtagcggtaaaactgtacatacagtggctggtccagtcccagttgctggcgaatattttccacgatagcatcgctggcgcggtcacccgccagtaaccgcgccggatcaccagggatcagatggctgataataaacgtaatcacgcagacgcccgccaccacgagcaccagcccccagcagcgttggcgtaaaatactccagaaggtcacgttatttactcatggtattgatattgaagacctgttccagcatgggattgaacacaaagcctttcacctctttgttcatcgccagttggtagtttttctggaacaggtacacataagcagcgtcatcaatgacgattttctgtgcctgctggtagtcccgggtacgctgcgtctggtcggtggtcgcaagcgcattgcgcagtaacttatcgacctcactgttttcatagaagctgcggttacccggcagaccttttttgtcactctcaaaccagtaattcataaacatatacgggtcggcaaaatccggactccagttgccaatcgcaatgtcgtaatcacctttacccactctgtcgcgcatggtggcgttcgccagcttttccagcttcacaatgatgcccagcttgttgagactggattgtgtcgccagagcaataggctcccagttcggatcgttatcggagtagagaaacgtcaggctggtgggtttgctcgtcactttatcccattcggctttggctttcgtttcgtcatggttgtattgcattgccgtcgcatcgtagccccacatgccttccggaatcgggccgcgcatctgttttccgttaccactcagaatgccgttaaccatgccctgataatcggtagaccaggaaatggcccgacgcagatccgcctgattaagaggcgctttgctgttattcagatacagataggtaacgcgcagactcggatactctgccacattgactttattttcctgcttcagggcgttgagttgatccaccggcagcgcatcggcaatgtcaatgtcgccacgggagagctgcaggcgacgggaggcactttcaccaataatttttacgcttacccgtttgaagttcggtttattgcctgggtaatgcggatttggcaccagaactaattgctgacctttttgccagcttttcagcataaatggtccggaaccggcggtattttgcgcgaggaagccgcgagcatcatccgctgcatgttcctttaagaccgccggattgataatggatgcaccgtcattcgccagcgtgtagaggaacggtgcgaatggttggctaagggtaaacttcaccgtatgttcgtcgggagcatcaatctttaaatctttgggaaatgcttctgctggcccctggccgatttttagtagccgctcaaaagaaagttttactgcttcggcagtgacaggtgtgccatcggcaaatttagcattatctttcagggtgaacgtccactctttttgatcgtcagacgctttccagctacttgccagatcgccttcaacgtcggtactgcctttatcaccgtccgttttgtactgaaccagccgctgataagacgggtaggtcactgtccagtcgttattatctattgttaccgccgggtcgagggtttgtggatcggcggccttaccaatcaccagcatatcttttggtacggcggcgtgcgcaaccgggaaatttgtggcaaggacgagcgcgagcaatgtgggacgaaagcttatgcttctcttcatgacagtttcctgattaactgacgtgctgtgtgccaggggatataaaacaagagaattgatcagcgagcagagggtaactcgctgcctggggtaattcgaagtgccaccattcgctggagataccgacaaaaccgccaccagtcattatcgcattcagcaacagccgattgcgctgagcggcgggcgggacggaagggtgataggcatgggagcgctcgtgcatttcatcgaaccctgcgcccatatcgaggatgttcccgtgctcatcacgaagcgtcaggtcgatcgccgtgccacggctgtgattagaaccgaccgtcacatcaacaacatattgcgggtctgggcaggcttgccacaacatcgcctgtgcttgttgtgggcgatacgcatcgtaaatcaccagttgtaacccactcagctgggcgatgctgatacttttcgccagcgcggtaatcgcatccttgtgtaacagacaacgcgcttgctgataaatagctttacctgtgatgttatcagcgcaggcgtatttcaattcgatctccagatcagggaagattacggctaaatcaaccagttcggtggtatcgctcataaacggttcctgtataagacaaaaattgctgcgctttccgcttatgcagatctcatgccatgccgggataagcgccagaatgctggcttaaagttatattttttaacttttgatcaacatttgtgcagcgtagtgcagttttggtgcaagaggggaagttaaggaaggaatctcccggaatcgtagctgaaatcacagtatttaagtgacagtgtcacgttaaatgaaaacccgcgagtgcgggcgagaggaatttgtcagattttcagcggtaacacgctgctcatccagcctggaatttcttcggcgggtagggggcgggaaaagaaatatccctgaataacgcgacagtggatcttgcgtagcatctcaaattgctctttggtttcgacgccttccgccacgacggttaaattgaggctttgcccaatgctggtaatggcttcaagtaaggcaaggatgcgtttttcggtcagacaacgatcgacaaaacttttgtcaattttgatttccgttaccggaagactgactaagcgggataatccggaaaagcccgtaccaaaatcatctacgcttaagcccacgcccatatcacgcaggatctgaatgcgcttaaagatttcggtatcgtgttccatcatcatgctttccgtgatttctaccgtcagctggtggccgtcaataccccaggcgtgcattgcatcagacacctgattaggcagttgattactgcgaaagtgcagcgcgctcaagttcacggataacgccgggatatgaatattctggctacgccattctgctaactgacggcaagcttccgcgatgacccagcgcccaatattttcgatttcaccaatctcttctgcgagaggaataaaccgactagggggcacatgaccatgcaggggatcgtgccagcgagcaagggcttcgatgccgtacagttcacccgtttctgcgaagatttgcggctggtaaaccagtttcagttggttattgctaatcgcttctttcagcgctgcgcctaaaaccaaacgctcttttaccatttcgttcatcgccgggctgaagaactgccagccgttaccgccattcttgcgaatataatccattgcattgtgagcagtggagagcaagtaatcgcggtttttacccaggtcgtagctgatgccaatactcaaggtaagcgggaagggtttatcgtcaatcattatcggcttgctgaccacattccgtagctcatcggcgatttgggtaatgttactgacgtcgttttcgaggctcacgaggacaaactgcgtaccttcgatacgacagagatactgatccggtttgagtttttcacgaaagcgattgaccacttccagcaatgcctgatcggcccacgcatagccaaggctatcaatcacatcctgaatatggtcaacaccgatgagatacaccacgggagagacggctttgtcgaccaggtcatcgaggtaattgtgcaggttattgcgatttggcagaccggtcatcggatcaaattggatgagttgttcaatatgctgacggcttttttcctgttccagcgccagcgcggccatatgctggctgatatctgccacgcgttcgataaaggcgctggtttctgctccactgctggttttaatttgcaggatccccgcaggcgcgccatcacgctgacgaatggtcgcactccagctttgcgcattttgaatttctgcaccgtgggaagaactcgcccagtgtatcggcatcccgttgcgcagtgcgaacaggctaacatggctttcgttgagtacagattcgatgttacgacaaatgatttcccccatttcatgaaatggcgggctgctgcacatggcggcgagaatattgccttcaagctggcgaatctgccgttcttcggtgatatcgctgaaagtcattaccaggttctgcagatgcgcgagcacgtcataaaccgggctgatagaggctttaatccagattttttcaccggtgcgcgtcaacagcagaaattcgtcctgatcgcgggcggttttccatagcaactgttgtaaacgaatgcggttatcggcagggaattcaggaatgttcaggagtgtatcgggctgcataccgctggcttcgctaatgcagtaaccaaacatttcggtaaatgcgcgattgcactgcacaatatggcgttccggatcgaggacaatcaccggtcggtcgagatggtcaacggcaataatcaattgtcgggtctgttctttttgcgccatttctacgctggcatcccgtaccagcgccaggtaataaactttcccctcggcgctcactttgcttagcgcaaaacgggtccagattttactgccgtcttttttctccagctgcagctcccgactcatcccctcaacacgcgctttaccgccttcacggttgtgacgaatgtattcaggatgcgcaggacgcaaatcccgcggaatcagcatatcaatgttattgccaatgacttcttcacgtttgtatccccagagcttctctgcggcggggttgaaaaacatcacttcatcattttcgttaattaacaccgcacccatcatattttgctcaagggcggggaaaaaaatgccatcggcggcattatccgcatcggttagcttcatgattacctctgcatcctggcgcatttaaagactggctttccagagttcaacacggtttctacctcgtcttttggcgatatacagagcttcatcggctatttgaatgaggcgctcatagtcaggatgaccattaaacatggcggcaccgatggaaagactgagggcaatatcttcgccgtttgcggctttcagtttggttttctccacccgactgcgaatacgttctgcggtacgtaacgtttcgttttcagaagcttcagtcaaaacaatgataaattcatcgcccccgtagcggaaaacataatcactactgcggacgttgtcataaaaggcctgagagactttacgcagaatttcatcaccagtgttatggccccacgtatcgttgatctctttgaatttatcaacgtcaataatcagcacactcagcggtgtaccggtccggttggcatgggcaatttcgcgtttgaagatagtcggtaggaaacggcggttaagtaatttcgtcagtacatccataccgacttcgtggcggcttacttcttcaaacaattcacgcagcaaggtaataatttggcttacggtatttcttatctgtaataaaaatttcacccgcagacttctgttattcaaatttctggtgttacgcatggtttgattgaaaataccgtcgaaatcctgaatcagacgggagatatggcctacttcggcaataccactaaaataatgtcgacctttatggttaaaccacaggccaaaatcagcctggcttaaaggcaaactactgcctaaatcagaatccagcaggattttatagataatatctatttcccaactaagtatactggctatttgccgttctttttcttcttcggcgttttccagtaagctgaagatacgatagttttcatcttccttactggcactactgtcactaaaggtaaacgcgcgagtcatcacttccatcgcgatatcaatactgttaatgctgaaatggtagacctgaagtttttctgcggcggaataatcgctagagaagatcaccggatagaggatttttttcagcacccgaaaccccatctcgacaatttctaccggaattcctatgcgggcatgcacttccgcgacggtatgctggatttgtattagcctttcgacatcgtcaacctgggcagaaagcacgttaataatccagcgttccatcgcactcttcaactgccgctcaacttgttcattactcaagaattcttcggcatgcgggtcgatgcggacaattcgataaaactcgatactcagataatgagcatgcgcaacggcaatttccgcggctttagcacgaatgggcggatctgcctgttcgacaagtccggtccactcatctttcattcttttaaaatacatctccataattcacacccttataaggctgggaaatcagacggaatcaaaatgaaacgcaacgtgcgagatcgactaactgcaccatattctcctgaaatatgaagatatactgaaaagaaataagcgatttaggacagtttcaatctacgctactgttcttcagaagagtatagcccatcgtaattatttttcggtgacagcgaatatcgtatggtttttcatattcatacatttttattagggatttatggctgtttaactaagtgtggttaatttgacttaagtaagcatgattattagtgggatagtttaagagggtaacaagccggtgggtaaagcaccggcttgttacaaagtaagaatgggagtttaactgccccagcgactttgcagatagctgaccgcttgttgagtctgcggtttattcagatagtcctcacggaacaagatggtgccgctaatttcgggcacagcatcgttaagatcgagctgctttttcagttccggtacgccgccgttaatcatccagtctggctctatcttactaggttcacccactttatagaaggcgataccgatatacaggcgggtcctggtcggtttaacgacatccgcccaccattttgccaacacgtcataacgcgcggcactccgactgaacggccagtaaatttggggagcaatgtaatccagcaatccttgttccacccatcgacgggtgtcagcgtaggattcgtcataggctgccgcgcctcgggtatcggaaccgagcggatcgtgacttcggttacgccacacgcctgccgggctaacaccaaattcgactcccggcttaatgcttttaatggtgtggcttacctttgcaattaactgctgagtattgttgcgccgccagtctgctttactcgcaaatgcgcctccgtatttacggtacgtttcgttatcatttagccgactacccggactctccgtatagaaatagtcgtcaaactgcacgccatctacgggatagcgggaaaccacttctgcgactatacttgtgatccagtcctgaacctcagggatgcccgggtcgaggacaaagcgatcgccagacgttctgatccagtcgcggtgttgcacatagacgctcgccggttgttgagacagagtgctattcagttccctgatagtaccgggcttcgtattaacgcttacgcgataggggttaaaccaggcgtgtactttcatcccacgcttgtgggcttcgtcgagcataaattgcagcggatcgtaacccggattttcaccaatcttaccggtcataagatcggaccacggcaaaattttgcttggccacagggcggtaccgtccggcttgacctggaaaaagaccgtgtttatgccgagacgttgcagatgatccagtttgtcgatcatcgcctgttgttgtacacgggcccggctggtggggttactaatgttaacgctggaaaccggtggccagtcgagccgagaaaccgtggccagccagatgccacgcatcggttgactgctttgttgcgtcgtggctggtggcttactacctgctggtggtgtcaccatggactctggaggcgtgcttttacaactacacagtaaaagtgccagtgcaactagtatcgctggtcttctaatcgttaatttcttgtttcgggagcagatatccatatgtgctggtttccggtaaacagatgtgcgctcattctcgtacttatccccgttaagtcaatacgacagcaagcacgaaaaagggagcgatgaattatcgctcccttgtcttataaccattcagacatggttagtgtttcttgtcattcatcacaatatagtgtggactacgtgcacgcgggtgcaggaagaagtgaccttttggtgcgttctgactgttgattggctccagagtgacgccggtatttgctttgcctttacgatcatgaacagcatagagaataaagggcagggcaagtaccaccaggaaactaacaaccagtaattcaacatacatatcggtagaatcaccctggatgttatccggcggcaggaaggaaacaataaacgccataatactagtcagcagaccgacaattgccacgaccagtttcacccctttaccaccagggatattaaatgtgcgttttaagtcaggatgtttaagaaccaacacaatgtagccaataaacagcatgaaataagcacacagataaatcaccaccgtcagcgccagtgcgatcaggaaggacatgttgttaccgccaccggtattggtgaggatgatcaacgcgatagacgtaatcaccagctggctaatgaccagcgttaccggtacgccatttttgttcattttagcgaatgccgctggcagcaggtttttctgcgctgttacatacatcccgcgagaaggaccaacaatccaggaggcgatttccgccagaacacccagcaacagcagtgcggagatcacgcgaaccgtccactcaatttctggtgccacatgggacatcagaacggtaaaggtttgcattacccctgcggagaggttgatttcattacccggaatgaccatcgcaatagacaaaccaccaacagagcttaagcagattgccgccaccatcagcagtaacatagccaacggatagtcgcgccctgggttgctcatttcattgacgtgggttgcggatgcttctacgcccatataactcaaaatgaaggcaacaaatactaccagggtgcccactttagagaagtcagggaagaaggtcttgctatccatttcgatagcaacgggggcaccggagtgcagataaatagccgctaatgcgatcaaaataaatgcaggtaacaggataccggcgaagaagccaactttagcaattcgcgccgtgtatttcgtgccaccaaactgcgttaatgccagcgcccaaagaatgatgagtgctgcaatagttttggtaatggggtcttcattcagcgctggccatttcaggatgtaggagagtgcccctaacacgaaatagagcatcggaataaaaccaatggcgatttgcagatagccaaaactgatcgctgcaaatccccatctcggccccagagtattacttacccaggcgaagacaccaccttcttcccagccgtcgacggtggccatttccgcagcacaaagtcccacgggaataaaccataaaatcccgcctaatagcaggaagaagactaaactaaagccgcttgttgcgaaggtagggtattcataaacagccattaccatgcttgccgttatggcaaagaatccaagtaatgtgagctgcttagctttacctgtctgtacacttgtagccatattatccccctaaaacggtattcctgtcggaaccgcacctgttttgttctgaagcgtattcagaacaatattttccgttgctaatgccagtgaacagactttggaaattgtcccgaaacgggttcgtttcgggacaccgttaccgttaaacgttatcaggtatgtttaaagctgttctgttgggcaataccctgcagtttcgggtgatcgctgagatatttcagggaggctttgtagtcttccagcaacagttcagcaaagtccatttcgaagccgcgacgacacataatgcgcatcaccacgatgtcggtggcttcaccgccgagagtgaaggccggaacctgccagccgcgcagacgcagacgttcagagaggtcatacagggtgtatcccggatcttcaccatctttcagtttgaagcaaaccgccgggatgccttcgtccgggcgacccgtacagatgaactcatacggccccagtttggcgatttcatccgccagataagcggcaacctggtaagaggcgttctgtactttggtatagccttcacgaccgaggcgcaggaattcatagtactgtgcaattacctgacccgccgggcgggagaagttgatggcaaaagtaccaatttgaccacccaggtagtcaacgttgaacaccagttcctgcggcagcgcttcttcgtcacgccagataacccagccgcagcccagcggagccagaccgaatttatggccactagcactgatgcttttcacacgcggcaggcggaagtcccagacgatatccggggcgacgaacggtgccaggaagccaccgctggcagcgtcgatgtgcatgtcgatgtcgataccggtatcggcctggaatttatccagcgcatcgtgcagcggttgtgggaactcatagttaccagtgtaggtcacgccgaaagtcggcaccacgccgatggtgttttcgtcacaggcttcaatcatgcgtttcgggtccataaacaactgaccggggcgcatagggatctcacgcagctccacatcccagtagcgggcgaatttatgccagcagatttgtaccggaccgcacaccaggtttggtttatccgttggtttgcctgcagcttccatacgcttgcgccaacgccatttcatcgccatcccgccgagcatacaggcctcggaagaaccaatggtgttggtgccaacggcctgaccatttttcggcgcaggcgcatgccacagatcggcaaccatatttacgcaacgcaggtcgatggctgcggattgcggatattcttctttgtcgatccagtttttgttaatggataaatccatcaatttgtggacattttcgtcgtcccaggtctggcagaaagtggccaggttctgacgagcgttgccatcaagatataattcgtcattgataatctggaatgcgacatcgtcgcgcatttcgtgcagcggaaaacgtttactttctgcgatagtggaaatagacttcgcaccaaaacgactatcgagtagttcgctccttaaatccgttacttgcttcttatccattttaaactccttaaaatgattggatcgcattaaaaaagtaggatttatcgataaagtaagcaagtgcaaaggactcgtgtttaaataacaaaatcctaatgttatttatcgtgagatattacgcgaataatattttttcattgaaaaacaatacaatatgaaattcttgggtggtggtaaggtgttttatgctgttatttttatgcgcattctgtgtctcctgaattatcacgtaaaaatcagaccttaaaatatcactattagtacttgattattattttgaacgcatttataaaattattacataaaaatagcgaatattgctaaaatccccgccaacgatgtgttgacggggctgttattattttggcaataatactccggtataagtatttaccggatgagaaagatattgtttaacggcagtgttaacattctctaccgtcatttgtttcaacaattgctcctgctcagtccatgctgcaggatcgtcatattgaataagactatttacaatagtgttcgctaattgttgaacgctacgctgttggatatcgaggctgcgctgaacgttttgctggtattcattcagttcttgctcactgatccctttagccagacgcttaaccatcacttcattcgctaacgttaacagttcatcatgtcgttctggttgacaagtaaaagccagcaaatgactgatatctttggcctgaggatcaacgctgaggcgagaagaaacgctgtatgctccagatgcctgttcacgaatattaacacgtagatcttttgccagtgcgacgttaaaagcatcgagcgccatacgcgtcggcagattaacaggtgtccgggaatcataacgcttccactgactaacctgtgccacaggttcattttgttcttttacagtaacgcttgcgttgtccgtcgcgcgagttaatggtttacctgcggctaatgggctatcagagtgtttgatacttcctaagtaacgcgtaattaacgccacgagtttgtcttctgcgacattaccgacaatgacaaacgtgatatccgctggagaactaaacaattggcgatcggcagccagcgcatctgcggcagtaaactgtgcaatctgattttcttgcagtaatttcgtgcggtcatcagcatagcgcgtctcatacatctgctgggcgaatttctccgctggacgctggtcgagcgttttcaacgcctgaatttgagcattttgtaggcttgcccaaatattatcgttaatcgtgctgtgggtgattcgctggttaatcaactgaaaaccaggttcagggttattagtccgcgcgctaacggagagcaacgtattcatgccactgactttactgctcatggttacgctattttccgcactccagcgtttcaggctggaagaggagagttcgccaacgccgcttccgctaactgctttatttgccagcgcgataagacttttttgctgcgcagggaaacttaaatcgcctttattgcttacggcaataatttgtagcttttgctcttcacccgcggattttgccagaataaccctggcaccattggaaagtgttaaacttgtcagattctccgccagcgtttctttgctgctaatttccgcctgtgggtctgcgtctactgttaagcttaaatttctgcctgggaagacgtaagccgccagctttttgttggcgtactccttttccagcgccaggatagccgcaggagacaatgcttttttggcggcaacctcattgtttaccatttgctcccaaaatgcgtcctggttctttcttaactgctgccatttttccgccagactttgcacggtaatttgctgccacagacgtttgctaagttgatatgtctcttccgggctcaagaacggcgtattatttaaactgctggatgccaggcgactggtcagcatacgtaaatcacgttcagcttgctgatcaaccgcatttttcagccaggtgaggcgggtagatttgacatcatcgagttcttcagcagaaaaaccatgctgatcaatggttgccaactctgccattaatgcattcgcagcatcctgcatattatcgtctcgtgcatttacacggaaaaacaggctctgataatcgggtgcaattttaacgctgcgcgcagtgccgccagaaatagtcttcaactcgccgctctgtatgcgttcctgcagacgttgattgaacagctgaactaacatgctccattcagcttgttcgataaagctttgctcatcgttcacttgtaccattggcaggcgataatagagtgcgatgccgttcacccggttttctttatcattaatgatattaaagcgcaggtggttttcggcttttgtcggccagacgcgattttcagctgctttgttagccggaagcttacttaaattatcctttatcagcgccagcgcttctttactgtcgatatcgccgaccacgataaaggtcatattatttggttgataccagcgttgataaaattggcgcaattgtgccggtgtgaccgtggcgacagtatccatcaggccgataggttcacggtctaaattacgggtatttgccagcaggaaagggcggcgcgcctgagaggtgcgccatttcgcatcctgatgggcacgccattcctcagtaattacgccacgttcagcgtctacttcgagtttttcaaaggttgcggcattactccattcactgaagattgccatcacttgttgcagattttgtttctgcgtagtcggcaaactcacctgatacaccgtttcgtcatagctggtataggcattaacatcgcgaccaaaacgcaggcccatactctcaaatgtttcgatgactttattacccggccatgtttttgtgccgttaaacatcatatgttctacaaaatgagccacgccgagctcattgtcttcttcctgcaaactaccggtatgaatttgcagccataaatttacctgatcctttggatgagcatgcggataaatcatatatcgcaagccattgtccagttgcccggtaattaacttttcatcctgcggtaaggcggcggcaatcagccgcccggggagcaacagagttgccactaacgtcagtaagaaacagaggtttctcataattatctccatgcgaaaaccgggcgaatttacccggttaagtaaaatccgaactattaaaatttcatgctgacatcaagccagaaagtacggccactggcgtaggtcgccacaccggtgttcgttgtatcaacagcggttttgctatccagtacattgagaatatcggcactgatcgtcaggttttgttgttgcagaaattgtggcgtccaggacaagcgggtgtcccaggtcaggctgctatccagtttttcgtcaacatactgcttgtaatcactatattcgctgatgtattgcgcatttgtcttaccaaggataatgcgagctttacgcgcttcttgccaggccagcgtattcgcccacactaacccgctcggttgatgcgtgaaatccatgtttaaggagatctttaatgggttattaaaatctgccactggaacgctatcgtaagagaccagattaccgttataaaccacctggttatcaccggtattgctctcctcataaccattgtttaagctcaagttgcccttgctcttgatatagctaaagacaatttgtgggttaatatctacctggcggatatgcaggggttcggccagttcaaaactgaggctgaagctatgcgttttggttttgccatcgttgttatattcagtaatggtggttttagtcgcgctgtcggtacgactgcttttgctgatttgatcatgcgcttcacggtaaacatagtttgcacgcgcaataacgttcttaccgattttctgctgcaatcccattgccagttcatcgttataaggcgttttcaaatcctgataacgcgtcagagttttattaccacttacgctttccgtccagctattgcggatatcacgtaatcccatatcaagaatattcccgccatagtaacggttataacctgctgtaatcatactggtttgattagcaaaaatatcccattccgtcataaagcgcggggagatattgtggttactcagatagttgtcatagtcataccgcacgccgggcattaaactcacattacgccagctaatgcgatccgccatatacagcgtgtagttgtcaattcccaggcggcctttacctttatggtaaatggtatggttagttttctttccggcagcattaatcacataggattcagactggttatggcgttcagtccacgcatcggaatagatgtattccgcgccgaagtagggttgatggctaacattacccacggcgaatttttgccagtccaggcgtgttttgaaggtgtaattatctacagcctgggaaatgtgtcctaatccgccacgggtgcaacgccctgtaatatcaccatatgtacaactaagttcggtgtaccagatgtcatgatcgtgacgggtataatcactaatatgatcccaaccaacggtggtacgcagtttggcccatgcgagctgcgtatccatatcccatgccagaccataggatttattacccatttcgcgatcagactgcgggaaggtgctggtattataatcacggctggagccggtatattttaaggttaaatcgtgggtaaagcggtcgctggcaaaccaggtaaatttgcttaatgcagtatcgataacgtttttatactgtgcccgaccggcgacaatgccgtcattgctaacataatccgcgcgggtgatatcagactggcggcggcttaaaccggcggtaacgccgaagttatcagcgagttcctgattaaagctcaaggtataaaagttctttttaaaatctggggagtaataagtacttccactagagccttgattaaatgcgctcttgttattctcatcgatatggcttgttaaccagtcgctacgcgtagtgcgataacccaatttcaccttgctatcatcagcgttgaagcgtttgatctttgcatcaattaccccgccattgaagcgaccaaattcaaccggcacaaaactgtcataaagcgtcacattgtccagtaagctgacatcaagataatacccctgactcatcccgctaatattggttgcactactggcatcggactcattcgctgggttcaggttattagttgcactaataccgtcaatcaaataggcattctggtaggggctcgcaccgtgaatagagattttctcagggcgaatatctccctggttcaagctggtactttgcgtactatccatgcgtaccgcagggttggttctcagcagatcgctgatattgccattcccggtcggtaaacgctcgatgctttcactggtgtaatgcgtgttgccgtttacgggtacagggacaggagcatagaccgtcatctcttcaaaaaaatgcatgtacatgtttttgtcatcgacggcctgcgccacatcagcgccacataaaatgacgccaggaataagaactcgcttcatttatttatatctccgtacagcagggcttttattgtttttataaaaccgcgctaatgtcacaaatatcatcggccaggttccagacaccgggttgatgtgtaaccataatgacgccgcttgtgggtagtttttcacgcactaaacgcagtaagcggatagcctcttgttcctcaagatgagaggtagtttcgtcaagaaatatccatttcggacgtcgtaaaattaatcgtgccagggcgatacgttgtttttcgccgctggaaagaatatctccccagcgatcgtggtcatgaatacgcgcagccaatttcccaagaccaacctgatgcagtacttcgctcaagcttttatcgtctacgggcaggggaagtgctttacaaataatctctttcagtaagccggttttgattaacggtgtttgactcacataccaactgtcagcaggagaagaaatatcacctttaaaccacggccagcagtgggataatgttttaagcagtgtggtttttcccgcgccagagtagcctttcagtaatagccatttgcctgggctaacatgaaagttcaggttctctaatatgatcttattatcaggcgtacgaatactcgcatcagccacttgtaccgcatgttggcaatttttaggcttattcgtagggcgctgttcagtgagttgatggaactcatacaagcgatcgataaccgcagccagttcagcaagttcgtcatatttataaataaaccagcttaaattgttgcttaccagcataaatgcctggcggcttttcatcagtccgcccagattgatctgcccgctaataaactgcggcaataacagaaagtagggaagaacgctaaggctgcggctataaatattctgccagtaatcaagccaccgctgacgattcattaaacgatgccagttctctttaatggtatgaaaattgtcgctcaactcctggcgttgtagagactcagcattgcttagcgcaatcagttctgcctgcttattatgctgcacaagatttgttcgaaatgtcgcttcgctacgttgtttttccacattaagcggacgaatacgtttacccaccttatgggtaaataaagttccaccgatcacaatgagcacgacggtatagaccatatacccctggatattccattctgttccaccaacagtgaaactgagcgtacccgcgctttcccaaagaataacggtaaaggtgatcagcatgctaagactctggatgaagccaaaactaagactgagcgttttgctgatcagtaagagaatgtcttcagcgatacgttggtcagggttatctgtatttttatgctcgccgtagatctgcgtgaagtagtagtttttatctgcaaaccaccgattaaggtagtaatctgttaaccattcgcgccagcgaatagtcagtagtttaattaaccatgttttgtttacggatattaatacaaagatccccagcagggcagggaaccaaaggacaagctgccaaagcttatcggtttctttctggcttagcgcattgaaaaaatcattattccagtcgtttaaccagacctgaattttaaccacgccaaggatcatggcgaggataataatgattaacaacacactagttttattattcttacgcagccaaaagggcttcaacagacagagatactttgctatcaacatacgaagcgtaatgggaatggttatcattagcgaaaattgattgtgccatccaatgattatctatggcaatgatttactgatgaaatttatttaagtatcatttaacaatatgaaatataaaggaatatttcattttcagtggttatggttatgctattgataatcaaggatattgctaatgccctgatgcataccacgtaagccaggattttcgcaagggaagatgatgatgacgaaacacccgacaggaatttatgtcgggtgccttgttaaggtcataagaaggaggctaagaatggagttaaaagagagcgttattaattattctccatttgttttgcaacatccataatgtggtaaagcggtactctgttcttagctaactctaccatggcgttcatataaggtaccatggtactaaaaaggattttataaccttcgcaaaaataagaaacagtctcattgtttactttagtaatacgatgcttaggacaaccgccattgcagataggtttatatgcacattgctgacatttcgctggaatccgttttttttgcgctgtcagttgtacactgttcatcgttttgagttcagatttattaatgtttccaattttgtactgtggatagacaaaatggtcgcattcgtaaatgtctccattactttcaacaaccagattatccttgcaggactcctggaaaatacaactggtatgcccattccccaaaaaacggctgacaaagctttcaaactgacggatgaaaatttcacccacatcgtttttaacccattgcataaaaatggtactcataaacttgccataagccgtgggaggcacagaaaaatcaatgatacggaatgtgttctcactatgaccactgaaatcaatattcggcgtcccggtttctagcaattcgataaattgcatatgtttactgccgatagattttaaaaaatgataaacctcaagagggtaatggacattaacgttattaatgacggttaacgtattaaactctacttgataacttttcagacgctcgatggctgctatcacttttgcaaaagtaccgttaccactattactgcgtctgtaacggtcatgtaactcctgggggccatcgatgctgataccaaccagaaattcatgttctttgagaaaggcacaccattcattattcaataaaatgccattcgtttgtaatgcattaaaaatacgtttttggcctgcatagcgttgttgatagtgaataactttacggaaaaaatccaggccagccagagtgggttcaccgccttgccaggtaaaatagacctgattgccagacgctgcgatatattgtttgatgaactctttcagagtgctgtcatccatccatttttcatgagtaaactggctctctttttcaaggtaaaaacagtaatcacatttgagattacattgaaaactggagggcttggctgtaacgtgcatcgctatctcgctcaataaggcggcggaaaaatccgccgcatgaaggtttagttatttcgcttcgcttagtgctttcttgatattgttaaacttctcctgatttacctcgctaagcggtggctggctgctgtcgataaactctcttaccacgccttgcatctctttaacgacctgcggattggcggcggcaaggttatctttttgctgtagatccgtcagtttgtagagacctaactgattgttttctactgtatagacaaggctataatcgttatttctcaccgtataagagaattggcttaagtcctcagtgttggggttatgcgggtaatcgtcactctgatggcgaacaaatttgtggtaattatcccagaatggaatattttcctcgtcaaaccagtgagaataagaggttatccaggtcagatttttatgtggctcgccttgtttcttatcttgcaaccagggcagcaaggaaacgccatccagcttaaggtcttttggaatgctgatatcggctgcatcaagagctgtcgggtagaaatccattgcggaaatcagcttgtcataattaccgggttgaagttttcctttccaccacataaacattggggtgtgagtaccgccaggataggtctgactcttatagcctttttgcgccccgttcagcggcagaggaccatcgataaccgcaccattatcggaggtaaagagaataattgtattgtcatactgtccgtttttcttcagttgttcgagaatgcgttttacaccctgatcaacagaataaacggaagcgtagtagttatctgctgtttgactaccggtattaaattgcttctgatattgatccggtgcaggattatcatttggcaggtgcggagcattataagccaggtaaagcataaaaggctggtcaagtgttttggcacgatcaacaacgccaattgcctcatcggttaactgatcgctgatataaccttttgcggggacacgttcacgatttttgaacagactaggggagttgtaatatgccgttcctgcagcgtggaatcccataaagtaatcaaagccacggttttgaggttgccattcttccgcagaaaatgtggtgaagttgtcatgatagtcacgcgtttgtttatcttccggtaccggcacattactgattttactcaagtgccatttacctactgctgcagtgtaataaccatgattctggaataattcaggcaagaaagtttctgttagcggaataccatcctgagcatcggtattggaatagacaccaaagcgggcgggagctcgaccggtcattattgcggcgcgggaggggccggaaacaccgtgtgccacatagccgttagtaaaacgtacgccttcatccattaaactaaggagcgtcggcgtacttttttgtgcagcttcaatggctttatctatccctattttgtaggtatcgacaacttcacgattttccattgtttttgggtcaaaagatcccttatcaaaaggaagttgtccataaccaagatcatccatggtcagtacgataatatttggctttcctttggtactgtattctgtcggcgtaaagtcactgaaagcaacgtttgttttggttgctttcagctttacatcatctgccgcatgagcagcaaatgcagccataccagatgccagtatcaaagatatgctggtacttacgacacttttctttaatgcagacttcataaatgttcctcttcttattgtacttaattccaaagtaattttacgaagagaaataagtggatgtaagtgaagttagtcacataaagagatagcagatttagctaaaaaaagggaaaaaacagtccataaagcgttgacattactttctgttctattaagtaatttctcgccgataaacaactaatttattgatatttaataaattattgcattttactgacaaaatgcagaattgagatcataaataatcatgcaacaggttatgcaagtgcataaatatgtgatggatgtcacttatttatttcaataaatatatcgcctaaaaacaacgcggggcagggaatggctgccccatttaattcttacgcagcgtgtgtggttgactactcgttagcaaataatcaaatagctaaagcattcatcgtgttgcccgtattcatacccgtgtgactttgacaacggtactccttagaaactctcttcggactgttgccgaaatgtttgcggaacgcataaataaaataagatgtactggcataaccacattgttcggcaattttattgacactaccttctacgcgtatcaaattttttgcgtgctgcattcttgcatctaaaagaatctgactgaatgtcgtttgctcttgcttaagttttttcttcaacaggctttcactgatgtacaggcagtcacaaatatctttcagcttccatgggtgcgccggcttcatgttgacaatatttctcactttcccagaaacggatagcacaccgttagttaatagtgtaatgaaacctttgcatgcggcaaaaatagacaggcaagaaaaaagcaaaagttcactaaaattatgatgattgcgttcttcgctgttgagataagcaatcatttcattaagcaatccagtcggtacattactagcacgtaaaaacttcgcaggaacaggcaccgtcactgtctggatgttagtgcattgtagatattttttaatggtattttcagtaaatccgatctctttaaaatgccgctcataaggttcaaaatgcgtacgaacagcgttatctaccatcaggatctcgccgtcagagaaggcgtaatctttatctaaaatgttagcgttgaaggcatgatgaataaatataacagaacaaacgaggctcattttatctccttaaaacaataaagtttttatcgatacttttttaacatttcatatttataatttgctgtttgttttcagccttgcaaactattgataatgaaatgtgtaagatctcttgcaatgcgacccatttctgaaatactcagctgatcaattgccgaaaaaatggctatcaacgtaagtgtcagtaataagacaaccacaattgcagacatgatttctttatagttgtctctttgcgtgattttgtttttcactgtggtcgcatgcatttcaaatatgtttatttagcggataacgttaaaaatcgttaatcagtatgcttaatataacaggctggagaaaagaggaaataggactggtgcttcagtactgagcggagtttcttacagctgtaggcagaagtttatatcttatagtatgtagtttaatttaatccatgtgagcaaattgcgaaataatagtcaatgaggaattcttctgctgtgcggatgacagcagaagaaatgagaagaggcattaattacttggttctaattcaaccggaatacttttatagccaggaatgccacttaatggatcgtggttatcaagtgttagcatgtgattgctttctggaaaataggtcaccagactgcggtcagccatagggtaaatgaccacttttaatctatccatgcggcgactgctgcgcttaccgtctggcgtaagcgcaataagattaactctttcgccgttttttacacggcaaattttagcttgtttagcactcataaagaccacatctcgttgaccgaatacccctcgatagcgatcatccataccataaatcgtcgtgttgtactgatcgtggctgcgtactgtcgccatgaccagcttactgttaaacgcactagagggatcttctaacagccctttgctggtaatgaaattagccttaccactcggcgtcatccagcgcctttcagcagctgcatttatcaggtgaaaaccaccgggatgacggatgcgctggttatagtcggcgaactctggcagcacagcttcaatgtcattgcgaatgcgatcataatcttccaccagatactcccaggctaccacgctctggggtagtgctgcctgcgcgattcccgcgaccactgcacactcacttttcagcattacaccggcgggttttaacacgccacggctggcatgaatcatgctcatactatcctcaacggttaccgcctgcgcaccgtttttttgcatgtcaatctcgctacgtcccaggaccggcagaatatagctatgccgtgcggtcaacagatgagagcggttaagcttagtggctacgtgtaccgccaaatctaattgcgttaacggtacagcgctcgcttcccgatctggcattgccagcgcaaaattgccccccatgcagatcaatgctcgagcctgccccgtacatattgcttgcatgctggcaattgcagcatgtccaggtgcatgaggtggggtgaagccatagcgctcacccagacgagccagaaactctgcagacggtttctcggtgataccgacggttcggtcgccctgtacattagagtgtccacgtagtgggcagatacccgcaccaggcttgccaatgttacctttcatcaacagcagattgaccagttgctgtacgttctgggtaccatgttcgtgctgagtgatccccattccgtaacagataatggtgcgttcggcagcggcatatgcgtcagccagttcggcgatttgtgtctgacttagtccagaaatacgttcgatatctttccactcggaattgagaacgtcacggcgtagctcgtcaaagccgacggtatgcgtttgaataaactcgtcatcaagcaaactaggccgacctgcggcgcttgcagcatcatcgcgctcaattaacaggcgcatcatccccttgagcaacgccatatcgccaccaatgcgcacgttatagtaggcactggccaactgagtctcagagttcgtcagcatttcaaacgggttttgcggtgcggtaaatcgctccaggccacgttcctgtagaggattgatggcgatcattttcgctccccgtttcactaaagcgcgcaagctagtcagcatgcgagggtggtttgtaccagggttatgcccaatgcaaatgactaaatcgcacttctcaaagtcttccagcaacacggtccctttacctacaccgatactcgctgccaaacccacgcttgtcggttcatggcacatgttggagcagtcgggaaagttattgctcccgtattcacgggcaaaaagctgataaagaaaggcagcttcattggaagtgcggccgctagtatagaattcaacctgattgggatcactatagctttgaaggcgtgcgccaatttcgtcgaaagcttgttgccagcttaatggcttgtaacagtcgctgacggcatcatatttcaaaggctgagtgagtcgccccgcagcctcaagctcgtggtctccccaggtaagtaaactttgaaccgtattctcagcaaagaaagaggcgtttacctgcttatccgtgacttcccaggcgattgcttttgcgccgttttcacaaatgtcgaaactcgcactgtgcttaggatctggccatgcacaacccggacagtcaaagccctctggcttattcatgtcaaacatggcaataacatcctggcgtatatccatctgcttacgtactgcattcgctacggatttaacagcaccccaaccacctgcagcaccctggtaggattcaatttttttcttcatctacttatcctgtgtggaaatgaattattaggatttgtaatagcgatgatgcacagtacatacaaagggattatcgccaacatggatatataagagtaggggactactctctttctatttttaatctattatcgttaaacaatagattaaatacgataagttaagcatcatctctcatagtgtttaaattaacatatttttcaatataaaaaataagactctggcttcaattgtgcgcggattttcttacaggtgtaggctaatagccttcacaaaataattatccgcgcaattttcgtgaatggagcgcatagactaaggtcaaaatcacaattattcatagataaaagtgacaccaatgacactctggacggttccggcactaaccttgtttcctgtttgtccataggttgcgcttaaacccagaggtactttgcttttatttactgtccccagggagacattttctcccgtagccagtatttttccattacgcattagagtgacacccactccgcttgcttttgttgcatcaggtgctgtgttagcaaacacttgtcggctactgtcagtggtggcaccgctaagataaaaactgagcttttgttcgctactgcaatatacgccaaggggtatttctgcgcttccaggaaagtccgggagatccacggtgacatttcgactatcaacggtgcagccgcctgttggcataacaacattgttattactaataatattccacgtaaaattacgcggatttccgcttcctaatgttgcaattttatacatatgaatacgggcaatgacttcccccgcttttatgacaactccaccggccgccccaactggggtaatatagagttttaacggtaatggcatcggtgtcttatcaccaatatccaatacgttggtatttgtcgtcaacgggaaggggtaggtcacattattccagtacaggcttcctttataactctgtagggagcctgcgaaagcactgccttgtaccaggtttatatgatcagtgtcgtaccagccgccgtaatcattccagcaacttatatgctgagacaagtctacaaccagattctggcccggctgtattacagggtcgagattaacataaacagaggttgtacctgctccaatactactcccgccatcgacattacaactgaaggcaaaaactttgcctgccattaatagaagataaataccgaacaggacctttatactgattgttttacccatgatatatcctaaggttaaaaattgatttaaaaagaaggctaagaaaatcgaatcgacgttattgccaggtgtagatcacattgattagcgcctcgatcgttccctggcttgcgtttccattcaccgtgatagctcttgccttaagtggaaactgtgcattacgagtgatctcatcaacaataaccgttttgctatcgccattttttaacgcagcatcctggtcatccctcagctctatctgaatattttcggcagtaccttcatttttgtaataacccgtattgtcagtactacctgtcacgattgccgtcactgcacttgtttcaaccggacaatcggttaaactcaaagtaatattgtgccagccagatgcagaaccaggttgttgcagattgcgcgtataaagatccccgagattaacgttagcttctttggtttgaatagtgcagggtttagcgactacccgaccattaacagtgatagtgacatcggcggcctggagagttgctgtgaataacgcgcaaaacgtagctaacaggaacctcttgtgaagtcttttcatatctgactctgattattgaaattcaagggtaaaggttgcgctagccctcaccagtcccggattgacggacttctgagtactcttcagacgagcggagtaaggcaaaatattgttctgttctggtaccagtgggatccactgcatcccggcatgaagatcattcagtttcaccggacgcatatttgcgtccaatatttctatacccaaaccggaggccgtattgcttccttcatccagtttcaacaaagtattattttctgcatcctcaataccgttaaatgcaacccgaacccccgttgtccctttgctgcattcacttaacgtaatctgaaaagggacggctggacttgtgctaccggtcgttggaaattgtctggcactgtttttttggagatctacggtaaaattaaggctatcgctactgactgtgcagccataatcgaggacgcgcccgctaattttaataacgctatctgcggataaagcagaataggtggttaaccccagacataaaccgaggaaaataatgttattgtatttcataatctattgttccttagcgacagattgctgtctgctggttcagtaaggtaccaggagaaacttcaggaagcttgtactcgacaatacagttactgtttttatctttgccccaactaacctgtaattgcccactctgtggaagtccagtcagataaacctgaccattttccgcgacaatgctgccatttttattctctccgtgtgtgacaattgcaccgaatggaacgctcttattaccgtacttcaacgtcattaatactttcccgccgatttgtgcattaaatgttgctctggcaatagcaccgtgagttgggatgacagtgaccacggtttcatccagttcaacattatctgcaagggaattcgcgttaagagcaacacggttttctctatattctgtcgcaaatggtaatatggcatagccacgccagtcggtatgaattccggtctggttctctattttgacattatcagcaccaggagccttaaccagaaccattgtgtcgcccagcggctgtccaaaggtgatgccatcagcatgagcaataatcccaccactcattccgtaataaatctggctgctgtcaccactccgactgtaaccgacattagtattaccataagctccacgataattaagagaactgtaaccactggtgccagagcttgtattacctccgtgggtgttaccgacctgaacgctataattcaggttattatccggcagcagagtgccataaaccccgcttagattggtcatgccgcctttcaaatcgttactcatactgtaactggcgttactattacgaaatgcgctctgactgtctgtacgcatccaatgactgaagggaacattaagcgtaaaagcgagtaaatgatcccgatcgttttgccatatattattggaatagctgtaattcaggctagtcgtaatatcaccaaacggcacatttaatccaaaacttatttgctggtcgctgcgactcgtgttccagtaactttggcgactggcactgaaaaatgtcgtaccgtaatttccaagctgctgagagatgcttatttgttcctgaccacgcttactgtagaacagattaaaataatcaataaattgtgtctgctcattggtgtctccggtaggaggcttgacggtgtaaccactcattcgactgtaggcactgtcggataagttataaaaaccttgcgtagaatagcgatatcctgcgacctggatattggttccacaacaagtttattgctgcacttgttgaagagagtatttgcaaaaacattttatgtcgctaaataacatgacgatttcattatgcatgttatttataaaccgtgactaaacagaatattattgcgaacaagggaagtgtcaggaaaggtcaagagctaccaatggttaatatggctataaatcattagctatggttaatgtttgcttgctgaaactaacaccgaattgctctaaacagataagtgcagggtttattaaagctgtccgacagactttcttaacctggtaatatctctcttgggtgactctccaaacatccgcgaatattcccgacactaatgggatagctttcgtaaccgacagcataggctgctgtggtgacatcgtaatgttcattcagcatctgtcgcctgacttcattgagacgtagccatttctgataccggagtggactcattcccgcttgatccgtccttaaataagtaacagcaccctctggtgttttcgtatgcagtgtctatgcgacagacactgcgctcttagcatggggcagggaataaccaggctatttctccatgcacaggccaattatgaaagaggagaggcttaagttcttgaaccctgaacgaataacgactaccagaaaagcacttcgcatcactcagacatgatttaacataatatacattatgcgcaccaatataaaccaaggaagaatccagtcgttggcggtcatgattgtcatgctcattaacaatgaccaaaccccatatctcacttactaccgtattctcggcttaaccgtccatgcaacctcaacacattgctttcaactgccgtcaccacgttctccggaaaatctgtcggtaaactagtcttcacgttatccagtgctgctggaatcattctggcaaagtcactcaggatttcatgcatctgcacttccgggaatctcagcacctttgctgtcgccaaaaaatgtcgcggataaattttatcgattgccgtttttttgcctttggatgcgttaagccccattgccagtttgagatcgctgatgtgtattcccgtaccgccaaggaccggaaatgcactaatgatgtcgtaaaatggcgtgagtcgataactgccgccagcctgaataaatacggagaagttttttgcatgaccgtccgttgcgccaatcaaccactggaagacctggaatttcataaaatcatagcgatctttcagcgcctcgctggaccccatcaaaaaagccatgatccgcgcgatgcctgggcctccatcactttcatatttcacgctactaggtaaaccgaatgtctgacacatatcctcctgtggcaagcgaagtaaaaccgttcgctcagcattccaacgcctgtcaaaacgttcgaccgctaacgcgcgcacatttcccgctttaatgatttctgcgtccggaacattcaacccaagttctttcgccagcagcagacagtaatactcattatcaacgctttggctgagatcgagcgtcgcattgggctgcctgatttcgccaatcggtaatttaatgatgtgcgtcgtcggcgttattcctttcggaatgcaccagtcattgcctattctgagcagtgctgtcttctcctgtgcgccagcaacgctgatgcgaaagtcattttcttctctaatcatgcctagcgggatatctgctttataagccgttaatacttcttcaagtctggcttcagtaagcttttcccatgccattatcggatgcgttacggtttcgtcttcgggtattaacgtcacggcaccaacgctgtctcgccctatttcactcaataaatcaaacggttgtctggatttggcatgataacgtttaacgatccggtcacgtacaatcgggctatcgggtaacaggttatcgaagaagttaaatacggcatcagaggtgatattccccctctgcaatggcaggctaagactcaacggtctggcataacggcttgctaaccactccggtgcatacttaaaggtgtgcgcgccgttggctaacttcgttaactcgcctacccgctggttgttcatccaagtgacaagtttaggcattaccactccagattttgctgttctgtactttctgggctggcatttttcgcgtcgcatagcgtcatactgagttcaaggctctgtaaaatcttaaaaaatgtcgtgagcgtggtattgtcagggttgttttcgaaattggaaatcgtcgcctgcttaataccaatttttttcgccagctcgctctgcgtccagccattttgctggcgaaccagtttcattgcattcgccaattgcgttgggctatagatcttctgaaagctcatcatgtcatacgtccacagcaagtttatccgcttaaggggatattataagttttatcctttagtgaggataagtcaatctggaaacacatcttatccgctctacgggataaacgctgcgatatccgcgatcgcggataaaaaggaggatttaaataaggcgttgatgcgccgtttgaagtcggcaatattaagccgcatgccatctcgacatgcggcttatacggtttaccagctatatttcactcccagcatgccctgagtatcgctatagcctttatcacctagttgcacaccgacattcccccacaggctaaggttgttatttactttcgcctcaaccccggtacgtacttcaccgagattacgcgcaccttcacggcctacggtttgaccattcatcttcacggcgtagactttgctattgttgatccagttcgcttcaatgtaaggctggaactcacgctgtttaccatcgtcacgctggtgatggctgttcaggtaggttttcaccccaagtcgcgtttgcacatttccgtcgccttccgtttcaatgcgcgttccgtctttccgggtatggtcggaatctttcacacccatccaggtgatttgcgcctgtggctggacgtaccaggtattcagcgtcccttcgctgccgctaaatgttcccgcttcaaaggtatacccaccctcaacagaggccgtcacaccgcgagaatcatagtcgtcagcagaacggttatcggaactgacgctgttatcaaaccagttatacagcgcccagctgtcaacataagcgccggtcttattcgcatcgttctgataccaggtcgcgtacagcccagcgctgtaaccgctgatgcgcccatcgcttttataacccacacgattactctgagtattactgtgctgattggcgtagcctgccatcacgccaagatgccagcgatcctgcgcgttgctactccactgcgccaaatcgccgcctagctgcaatacatagcggttagcctgagtatttagctgaccgtcaccggccctactacgttcgtgccctccgacatgacgcatccacatactgcttgcgctcccctgagaatgcagactatctgtatactgcggctcacccagacggtcgtgtaaacgatggctaaacaggctgttggctgcggcaatgttgctgatatagcttccggcctccgggcgataaacacttgggccttccggatccacaacagggggattattgatgggatcgggtgtatccgctggcgttacgccgtcccatttactggtcagataccagtttttctcgtcattccccttccctttagccagcgtgtagacgtaagccccagcttcgacagttccggtggtcagcgcgaagttacctgcagaattaccgccaacctcaatgagttcaataccgttgaccgtttgtgcaccgacgccgccaatgttatcaacccgaacgcgagtgttcccttgggtatcgcctttcacgttcatcttatcggtggggctattatcgccgcccagcgtcgcgttgaacgtcatcaggccattgtttccggtatagttgccgttaacggtcagtacattccccggtttccccccttcgctattcatttgaaccgtgccgccattctccaggttgccgccgatagtggttttagcgacacgcagtgccccccccaggcataacgttcatatcacctgcagtggtgacatttccgctcatcacaccgctgttatggatattaatgtgttgacttgccatattaatggcagagtcggaaccgaaagcaatttccccccccacgatatccgtcgtaccctgatatgccgcggaatcgttgttaagagtcaggatcccggtacccagttttgtcacatcaccgctaccgctgatactgtgcgtcatcgcccagctacgctcagtggagatggtgagcaggccattattgataacggaagcatcacccaggtttttctgctcgttgacgctgagcgcgctgcctgtatcaatgttgaattgccccacaaagcggctattatcgccatccaactctacatctgtcctggcggttgcgctcacgatacccttcccgcttatgctattacgcagttcgccagtcacgttttttagcgttaacagaccgtcattggcaatatttcctctgcctaacccctgagtattatcgaggctgacttccgcatttgggctaatgctggttaacgcattgtagcgtgcattaagcccctcgatagccagcgttccccctgtaacattcaggtttccgccacctgtcagttcaccctgactgatcccacctttatttaccgtcagcgccccctctttgaacaaaacagtgctacccatctgcccggtgaatgtctctaccgtctgcgtgcttccattaagatcgacgatggccgcgttgctgatgttcagttcccgggtgttgccaagtgcaccatccgcatcggtacgtaatgtccccatctgaacgtaggttgccccctgatagtcgttctgaccgttggaaaggctaacctgtcgcaccgtattgattgccagatccccttcaccaccgatttttgcgctcatatcggccgttgcgccataggctccgccatgttcggctaacgtcagcttttgcccaccatggatgttcagcgctttcagcccatagttaacgtacaaaccattacctggtgcggtcgtgaggcggaatccataatcaccctcggcgaccaccgttccgttttgcgcaatgtgtaacgttttgtccgcttccacctcgtcgccctgtaaatcacgtaacgttaaactgccaccgctcccaataaccgtttgcgccttcaccagttgaacgccgacatggctatcgtcgtgttccagcaaattgagcgtcgtcagagggttattcgccatgggatcattccacggtttaggcacgtcgataagcacgtcgcccgtcccgtttacctgatagttacggcctttccaggtgtagtcacccgcgccgacaaccagcgtatcgacgctgatatatccctccgcgagcgtcgcagcaggaatatccgtatcgaaaatgatggtacctccattcatggccagtccaccaatggattgctctccaacttttacgcttgtggtattttcactgtcagactgcaacatcgcgtgagtaagcgcagcggtgttgtcgcgttccagagtgaaggtactgtctttcagttgggcaacaccggcgaattcagtccctgttgcatgggtaaagccaaacatcttgtcggaggaactcagctgcactcgcatcaagccatcgcctttgagcgcattggtcagcgtgtaatctcctgcactgttcgtacttgcgagaatgtcgagcgtaccggggtttgcaatggttacttcactgctccccatgcccgttaccccatctgccgtatgagacgcaatggtcaggaggccgtcattgaccagcgttttaccgctataagtattccctgcattgaacaccgtatggcctgcatcatggatcacttttccgtctttatcgtcacctgtaatcagcatatcgacctggtagccggcatcactgttattggtatgattaaagacaaaaacgccttcgccaagaccaaactccactttcgtcgcattggtgataaatccggcatctgccgccgcctcaccgtgagcagcaccaatgtttagcgttcctacagcaggctcaaaaacacctaagtaaacttctccaccttcgacattcagcgtaccgttattcgtcagggttaacgtacccgtaccagatgtccctacgtacatattgaatgtttcaagaagagagttctgcccatccaccctcacgtcgcccttacttttgtcattgagagctatctgtgtatcacgcgctttaactatacctccggtggtaatattcagttcacccgtgcctaatacaccgacctgtagcaattgtgcgttagtagaacttgtctttaaattccagagactgtccgtactaatattaactatccccttaccggaggcatttcctccgataaatccatagcccgtactattaagggtggcaccattactgacatttacgataccgctaccaaaattaccgacattgatacccacagtatcgaagctacttgtcgcatccatcaggttcagtgtgccgataccgcttgctttatcgcccaaaaaagtaatattttggcttacgaacttaccgccatcgctaatattgaggtttccgacgcccgcaacaccaatggtggtatagacattcttattgacctcccacattccccccgtggtgatgctgacattcccgacgccggtttctccataaccgagactacttcctccgttgctgacaacaagcccctgattactgatattcatttcgccgtggccgtcataaccaagattagttccgagattagtgataacggagttcttatccttaacagtaatgttgcctgtgcctgtttctttcatccccgcagtgataattccgctatctactttgccttcactgctgacattaagttcaccgtcgccagcatcaccgatatagatatagcggaaagcttcgcccgttccgaggaaattccaatgccctttatcggtcacgttgacgacaccgtgggaaccgtcctgaacgcccaccaaactatattctttgttattaatcagtccattattggaaatattgactgtgccattaccgaaatatccattatagagtctgcgtaccgtgatgacagagtcttgatcctgcacattcagggttccgataccggtggcattgccaccgataatcgtattttcagccgtaaccaaccccccctcgcgaatagtcgcctccccagttccttgattaccaatttgaaattcaatactggaatcattattttttattagccactcgccacccttttcaacgacaacctggccattactgcccgcctgatagcctaaaatggcgacgatactactcgtgacgtaacccttatccgtaatatttaaactacctgtgccatagctacctatttcgaataattcggtcgtcagaacagagtcctctccctcaacattgaccgtcccgacgcctcctgtgctagaacctaatcttaaatagcctccatcgacgtgacccttctgtttaatattcagcgtccccgttccggattgacccacatttaaaggccttgcattatttccgctatcatacaatcgccaggtgccacccaaaacattaacggtgccctcactgtcctcattagcgccaatgacgctggtagtaatagtggttaaggaggcattaccgccagccaaaatattaagcactccagtgccataccagccaaccaggtaggcatcataagcaacatcagtatcaatattggtaatctgatcattatcaacttccagacttgcaccagacgcactaccgcttagtgccagcaaaacacccagcgtcaatctactgaatttcgttgtcagtccagaggatttacgcaaattaaccgtgcttgttttacctgccctgcgagttaattcgctgcaggcctgaaatacctgtagagtgcaattccatatcacgcgatagattctattcatataaacgctccatatacaaacaatacagccacgaaagagatgagtcgtcagacattaaaaatgaaacttattaaattgtcagaggtctgtattgagtgttagttggaggtgggaaggtgtcaatttggctaatttgctaatgctttcgaattgatagattaaaaattgcatagttcttattttatttaaatatgaactatgagttattgttgcttaataagaaaactgtttctttcaataggaaaattatcatcatcatatttaacaaagaatagcactaattgctaaaaatcgaagtttattaaaccccttttgcatccattagtgtctttaggaatattcgctataaaataagggttgtgcttaatgctttaagaaaaatagcaattttcccttgaatatcgtactggtgatggaacgatgaatctgcaagctggcttttaacaagccagctctaaaagaagggaaataagaataactatactcaaaaactaacagccacggtcatcatgatgtggctgtcaatgaaattataacccaggcgctttccataagctcgtcgtcagtccatgatcaaccagccccagctgatcctgataaactgcctgccacttatcgcgactatcctgataaagttcatgcttttccgggtctggtgtgtgcgtccgttcccagcgaaccaggcgttctccggtttctgccatactactaaaaattccggcaccgacgccagctgcaatggcacatcctaatgcagtggcttctttgaccaccggaatattgacgggtaatccgctgacatcagcgagaatttgactccataatttccctttactacctccgcctgcaaagactaagctactaggatgaatattgctgaaatcagcaatttgctgcaagttacacgcacttacaatcgccgcattttcttccagcgcacggaacaatgtcgctttgttacatttatccgggtcaatggacaagttaataaaggaaggcgcagcgtgataccaggttttaaagcgcattctgtcggagaagatcggcattacgccccagctcccaggcggcacccgactggccatctcttccagcagcgtataggtgtcgatgcctaaacgttcggcaatcagtttttcttcggcacagaaagcatcgcggaaccagcgcatggtgagtccggtaaaaaagcttatagattcagcttgtaccatgccaggaataacatgaggattaacgcgcacgttcatttctgggtctgtcaccggcgcggctaaatttacaacttgctgccagaatgtgccgccaagaaccgcggtttgtgccggacgcacaacgcctaacccaaggcaaccaagctgcacgtcgcctcctccaacgaccaccggagtgcccgccttcagaccgcagagttccgccgcttgactacttaccacgcccagcaatgtgccggtttctttgacaggagaaagaatatcggcacgtaggccagccatatccagcaatgcaggtttccagtcacgggtggttagatcaagaagtcccgtggtgccagcgttagagggatccaccgccagttcgccgctgagcatataggccagccagtcgctgatcatggtgatggtacttgcctgacggtaaatatcggaacgatggtgcgccagccaaagtaatctggggatggcacttaaagccagtgtttgtccggtcgcgcgataaacttcgttttcaaaggtattgttgtgcagttctttaagttcgctaacttcgcgtgccgctctggcatccacattggcgcaggcccagatcggggctccttcattattatataaaacaatgccttcacgcatgctacatgcgctaacggcagcgatatactccggggctatgccggcgttgtgcagcgcctggcgcatacactcacacgccagttgccagtttttgttgagatcaaattccatagaaccaggaacgtccggtactgccagatgccgccactccgcctgtcccactgctatttgattgccttccaggtcgaatatcacagcccgaatacttccggtgcctgcatccagcgccatcaggtagtacttactttcactaagggtaaagagtcgagccattagattatcctcggcttatgcgttctgtctgttcctctatacgttctccatcattcccggtaataaggtcatgcaaatttaactacgtaaaatcgccgctgctgtgtcctgatcggtaaccagtgcgttgatataaccgcctttcattgcagcggcaattgcttcggctttattttctccccctgccacgccaacccggacgggtatggtcttcagcgcgcttaaaggtaagccaatcagttcgttatgtattttgatattcgtgacaacgtcaccttttgcatcaaaaaagtagcctaaaatgtcgccaaccgccccttttcggccaatcattaactgttcgccctggctgatataaccggagcgaatgattgtcgcatcgtcctgttgactcacagcaccaatgccgacaatcgccacatccgctgcttgcgcggctaacagaacatctttgacgcaattttcattttttagcgtacgggcaatgtcagcggaggatgcccgcaacggagccggaataatattcacactgcacgccgcgttaagctgcccgattcccgtcatataagaaccgacgccaccggagagcgtgaccaggcgaatttgctgactgctaataaaaccacttaagcgttgcagcgtattcatggttgcctcgccaaaaccaatcgccagcatctgttgtggttgaagtaaactcatcaacatatgcgccgcgcctatccccagtcgcccaccgacatcagcatccgcaagcccagggatcacccggacatgttgcaggctaaactgacgacgtaattgagtttcatattccagacagccttcaaagcgagaattaatctgtacgcgaataatgccggactgatgccctttctccagcaatcggctcactttcaaacgtgtcaggccgagacgatcgctgatctcgctctgggtcagcccgtcgtgatagtaaaaccacgcgatccgcgcgacctgttcttcttcacacattccctgttcactaattgcgctatcgttgattgtcataattcattcttcactttgaacatatttaaatctttaatgcaattgttcagttcttgctcatttatatctgtgatggcaaccacagtttgactctacgagcatgaacaaacgcaaccgtgaaaatcaaaatagcataaattgtgatctattcgtcggaaatatgtgcaatgtccacctaaggttatgaacaaattaaaagcagaaatacatttgttcaaaactcacctgcaaaactgaacgggggaaatatgcaaacgagtgatacccgcgcgttaccgctactttgcgcccgcagcgtttataaacagtatagtggggtcaatgtcctgaaaggcatcgattttacgttgcatcagggggaggtccacgccctgctcggcggcaatggtgccggtaaaagcacgttaatgaagattattgccggtattacccctgctgatagcggtacgctggagattgagggcaacaactacgtcagattaacgccagttcatgctcatcagctgggtatttatctcgttccccaggaaccgctgcttttcccaagcctgagcataaaagaaaacatcctgtttgggctggcaaaaaaacagctctccatgcagaaaatgaagaacttgctggcggcgctgggctgccagtttgatctgcatagtctggcaggaagcctggatgtcgccgatcgccaaatggtggaaatcctccgcgggctgatgcgcgacagccggattctgatcctcgatgaacctaccgccagccttacccctgcggaaaccgaacgcttgtttagtcgcttgcaagagctgcttgctactggcgtgggtattgtttttatcagccataagctgccggaaattcgccagattgccgatcgaattagcgtgatgcgcgacggaaccatcgccttaagcggcaaaaccagcgaactgtctaccgacgacattattcaggccatcaccccagcggtacgggaaaaaagcctctctgccagccaaaaattatggctggagttacctggtaaccgcccacaacatgccgccggaacgccggtgctgacactggaaaatctgaccggcgaaggtttcaggaatgtcagcctgacgctcaatgccggagaaattctgggcctggctgggctggtgggggccggacgcacagaactggccgagacgctctatggtctgcgtactttgcgtggcggacgcattatgctgaatggtaaagagatcaataaattatccactggagaacgtttactgcgcggtctggtttatctgccggaagatcgccagagttccggactgaatctcgatgctagcctggcctggaacgtctgcgcccttactcataaccttcgtggattctgggcgaaaaccgcgaaagataatgccaccctggaacgttatcgtcgggcgctgaatattaaattcaaccaaccggaacaagctgcacggacattatccggtggcaaccagcaaaaaatcctcattgccaaatgcttggaagctagcccgcaagtattgattgtcgatgagccgacgcgcggcgtggatgtcagcgcccgtaatgatatctaccagctgttgcgcagcatcgccgcacaaaatgtggctgtgctgcttatctcctccgacctggaagagatcgaactgatggcagatcgtgtgtatgtgatgcatcagggcgaaattacccactctgcactgaccgagcgcgatattaatgtcgagactattatgcgcgttgccttcggcgatagtcagcgtcaggaggcgagttgctgagctaaagtcagcgtcaggaggcgtcatgctgaagtttattcagaacaaccgtgaaatcacggcactgctggcggtggtgctgctgtttgtattacccggttttctcgaccgccagtatttaagtgtgcaaacgctgaccatggtttatagcagcgcgcaaatcctgatcctgctggcaatgggcgcgacgctggtaatgcttacgcgcaatattgatgttagtgtgggtagcattaccggaatgtgcgcggtgctgttggggatgttactgaacgcaggatatagtctacctgttgcttgtgtcgcgactttactgcttggtttgctcgcgggatttttcaacggtgtcctggtcgcgtggctaaagatccctgccattgttgccacccttggcacgttagggttgtacagaggcatcatgttgctgtggactggcggcaaatggattgaagggttacccgccgaactgaaacagctctccgccccgctgctgcttggcgttagtgcaattggttggttgacgataattctggtggcatttatggcctggctgctggcaaagacggcgtttggacgcagtttttatgccacgggcgataatttacagggcgctcgtcaactgggcgttcgtactgaagccattcgcattgtggcatttagcttgaacggctgcatggcggcactggcgggaattgtgtttgctagccagattggttttatccccaaccagaccggtaccgggctggagatgaaagcaattgcagcctgcgtgctgggcggcattagtttgctcggtggttccggtgcgatcattggtgcggtactcggcgcatggttcctgacgcagatcgatagcgtactggtgctgttgcgcattccggcatggtggaatgattttatcgcgggtctggttctgctggcggtgctggtgtttgatggacgcctgcgttgtgcgctggaacgtaatctacggcggcaaaaatatgcccgctttatgacgccaccgccatccgttaaacccgctagcagtggtaaaaaacgggaggccgcataatgcgtattcgctacggttgggaactggctcttgccgcactgctcgttattgagattgtcgcatttggtgcaattaacccgcgaatgttagatctcaatatgttgctgttcagcaccagtgactttatctgcattggcattgtcgccctaccgctaacgatggtgattgtcagtggcgggatcgatattagctttggtagcaccatcggcctctgcgccattgcattgggcgtactgtttcaaagtggtgtgccgatgccgctggcgatactcctgaccttactgctcggcgcattgtgcgggctgatcaacgccggattaattatctataccaaagttaacccgctggtgattacgcttggcacgctgtatctgtttgccggaagcgctctgctgctttccggtatggccggagcgacggggtacgaaggtattggtggattcccgatggcgtttacagatttcgctaacctggatgtgctgggactccccgttccgctgattatcttcctgatatgtctcctcgttttctggctctggctgcataaaacccatgccggacgtaatgtgtttttgattgggcaaagcccgcgcgtggcgctttatagcgcgattccagttaaccgtaccttatgtgcgctctatgccatgacggggctggcgtctgcggtcgccgctgtgctgctggtaagctattttggtagtgcacgttccgatctcggtgcgagctttctgatgcccgccatcaccgccgtggtgcttggcggggccaatatttatggtggttccggttccattatcggcaccgccattgcggttttattagtgggatatttgcaacaaggtttgcaaatggcaggagtgccaaatcaggtgtccagcgccctttccggtgcgctacttatcgtcgttgtcgtaggtcgttccgttagcctgcatcgccagcaaattaaagagtggctggcgcgtcgggccaataacccattgccataaaggatatcttcatgacacttcatcgctttaagaaaatcgccttacttagcgctcttggcattgccgcaatctctatgaatgtgcaggccgcagagcgtattgcatttattcccaaactggttggcgtgggattttttaccagcggtggcaacggcgcacaacaagcgggtaaagagctgggcgttgatgtgacctacgacgggccgacagaacccagtgtttctggtcaggtacagttgattaataacttcgtcaatcaaggttataacgccattatcgtttctgcggttagccctgatggcttgtgtccggcactgaaacgcgccatgcaacgtggtgtgagagtgctgacctgggactctgatactaaaccggagtgccgctcttactacattaatcagggaacgcccgcccagttaggaggtatgttggtggatatggcggcgcgtcaggtgaataaagacaaagccaaagtcgcgtttttctacagtagccccaccgttacggaccaaaaccagtgggtgaaagaagcgaaagcgaaaatcgccaaagagcatccaggctgggaaattgtcactacgcagtttggctataacgatgccactaaaagcttacaaaccgcagaaggaatattaaaagcgtatagcgatctcgacgccattatcgcccccgatgccaacgccctgcccgctgccgcacaagccgcagaaaacttgaaaaatgacaaagtagcgattgtcggattcagtacgccaaatgtgatgcgcccgtatgtagagcgcggcacggtgaaagaatttggcctgtgggatgtggttcagcaaggcaaaattagtgtgtatgtcgcggatgcattattgaaaaaaggaagtatgaaaacgggcgacaagctggatatcaagggcgtaggtcaggttgaagtcagcccaaacagcgttcagggctatgactacgaagcggatggtaatggcatcgtactgttaccggagcgcgtgatattcaacaaagagaatatcggcaaatacgatttctgatgtgcattacttaaccggagtaagttatggcagatttagacgatattaaagatggtaaagattttcgtaccgatcaaccgcaaaaaaatatcccttttaccctgaaaggttgcggtgcgctggattggggaatgcagagtcgcttaagccggatatttaatccgaaaacgggtaaaaccgtgatgctggcttttgaccatggttattttcagggaccgactaccggacttgaacgcattgatataaatatcgccccgctgtttgaacatgccgatgtattaatgtgtacgcgcggcattttgcgcagcgtagttccccctgcgaccaataggccggtggtactgcgggcgagtggtgcgaactctattctggcggaattaagtaatgaagccgtggcgttaagcatggatgacgccgtgcgcctgaacagttgcgcggtggcggcgcaggtttatatcggcagcgaatatgaacatcagagcatcaaaaatattattcagctggttgatgccggaatgaaagtgggaatgccgaccatggccgtgactggcgtgggcaaagatatggtgcgcgatcagcgttatttcagcctcgcgactcgaatcgccgctgaaatgggggcgcaaattatcaaaacctattatgtcgaaaaaggttttgaacggattgttgccggatgtccggtacccattgttattgctggcggtaaaaaattaccggagcgcgaggcgctggaaatgtgctggcaggctatcgatcagggcgcttctggtgtggatatggggcgtaatattttccagtctgaccatccggtggcgatgatgaaagccgtacaggcggtggttcaccataacgaaacggctgatcgggcatatgaactctatctgagtgaaaaacagtaactgcggatctaaggagaagaattatgcacgtcacactggttgaaattaacgttcatgaagacaaggttgacgagtttatcgaagtttttcgccagaaccacctgggctctgtacaggaagaaggcaatttgcgcttcgatgtcttacaggacccggaagtgaatagccgcttttatatctacgaagcctataaagatgaagacgcagtggcgttccataaaaccacgccccactacaaaacctgtgtcgcgaaactggaatctttaatgaccgggccgcgtaaaaaacgtctgttcaatggtttgatgccgtgaggcgaatttatcaattttatctacaattggggtaacgcgctgacgggagtaaaaaaatgtctgactggaacccctctttatatctacacttttccgctgaacgaagccgtccggcggtggagctgcttgccagagtgccgctggaaaatgtcgaatatgttgccgatcttggctgtggcccaggtaacagcaccgcccttctacaacaacgttggcctgcggccaggataacaggcatcgacagctctccggcgatgattgctgaagcgcgcagtgctttgccagactgccagttcgtggaagcagacatccgcaactggcaaccggtacaggcactcgatctgatttttgctaatgccagtctgcaatggctgcccgaccactacgaattgtttcctcatctggtttctttacttaatccgcagggcgtgctggcagtacagatgccagataactggctggagccgacccatgtgctcatgcgcgaagttgcctgggaacaaaactacccggatcgcgggcgtgagccgttggctggcgttcatgcttactacgatattttgagcgaagccggatgtgaggtcgatatctggcgaaccacctactatcaccagatgccgagtcaccaggcgattatcgattgggtgactgccactggattacgtccgtggttacaggatctgaccgagagcgaacagcagctttttcttaagcgctaccatcagatgctggaagagcagtatccactgcaagagaacggacagatactgctggcatttccgcgtctgtttattgttgcccggcgtatggagtaaatatcacgtcagctggtaatgacgatcgggaagaatttttgctggaatttcggcttcatcgttcatctgtaacaggtcaatttcaatagcgttgcagatggcatccagtggtaaatcattgttttcagtaccgaacggatcttccagttcttccgccagacaatccaggctaataaaagtgtaggaaatcagcacagagataaaaggcgtcatgtaatgcaggtccacgaccagcgcgaacggcagcatgatacaaaacagataaacggtacgatgcaaaatcagggtgtaggcaaagggaattggcgtataggcaatgcgctcgcatcctgccaggaccgcactaatatcattaagccgatcgttgaggctaataaacaggatatcactaagctgtccattgcggcgctgaaccgccaaccattctcccattattaacaagatacggttagctggagagttgctagccagtacacgctgaagatcttcagtcttgagataatgagccagcacttccgcctgtggctgtttgcgtaatgtcatgcgtaaacagtgggcgaaagcgatttgcagccgggcaaactcccttacacttgcgctatccggcaatgtcgtttttacctcgcgcagtaagctccgactggcaatcatcaactgcccccaaagttttcgcgcttcaacgtaacgggcgtacccggcattattacgaaaaccaagaaaaatggcgatggcgacaccgagaatgctgaacggtgcgagggtgaatttgatgcccagatgcgtgtaccagggcagcatgaaaataacagcgatagaaaagagaaaattgagtagtaagcggctggatatcttggataatacactgccgtgccagacaaaaatacggcgcagccagtgttgttgtggacgaacaatcatggttatcttcaggcgtggaaaagtcgccctattaaacgtgattacgatcacattctcaagacgctacttacaaattacctacaagcttacaacattagcaggcgctgcatgtggcacctgttaatgataaaggcatataggatgttgtaactaatatggtgaaataagaaacccggtcgaaaccgggttcagaagtaacggtgttattagcacaacggacgtacagcttcgcgcatccctttttcgagaatcgcatccaggtcattagcaacctgctcgaccagaccaggcacttgcgtcaggtcctgctcccagtggtctttttctgccaaaacaatcgctaccagttcctgggtgccgataacacggtcacgatgctggctccagagttgctgataacgttccagccagtgtgcatcgtcctgtaccggatatgtttcgccgttacgctcaccacgatagaacgcaatcaatgccgctaatgcgaaagtaaggcgcgccggaagtgtgccgtttgccttctgccctgccagcagctgtggcaggatgcgggtgcggaacttggtcataccgttgagcgcgatagacagcagctgatgcttaatgtacgggttacggaaacgcccggtgactgcactggcgaaagattccagttcatcacgaggcaaatccagtaccggaataatttcttcgtagatagctttttcaacgaatgcgcaaatttcagcatcgttcatcgcttcacctacggtatccagccctgcctggaacgccaccggcaccagcgcggtgtgcgcaccgttgaggattgccactttgcgttctttgtacggtttaatatcgtcaacaatcagcacgttgagcggatatttgtccagacgcagttcagtcgctaaggatttcggtccctgaatcacaaacaggtaaaagtgttcagcggtgtcgagaaaaccatcgtgataacccagttcttcttccagtttagccacttcatcgcgcggataaccggtaacgatacggtccaccagcgtagaacagaagctgttagcctgatccagccattgaataaatgcttctggcagtgcccactcttgcgcatagcgcagcaccagttcacgcaacgcgtcgccattgtagtcaatcaactcacacggaatgatgatccaacctttatccagcgcaccgttgaaatggctaaagcgttcgaacagcagacgggtcagttttgccggatagcttaccgctggcgcgtcatcgaatttatcgcccgcatggtagctgatacccgcttcggtggtgttagagaaaacaaagcgcatttccgggttgtgcgccagtttcaggaattcatcgtattcactgtagacgctgatttcacgattaacgctgcgaatcagacgcgcgtcgctgaccgcttcccccttctcattcaggccacggataatggtggtgtacagaccatcctgcgtgctcagactcggcgggaaactagtttcaatcggacgaacaacgaccacgccagaattcagatcggtgtgctcattcaggagatcgatttgccagtcaacaaaggcgcgcaggaagttaccttcaccaaactgaatgatacgttctggatactgtgcaccgggaaaatcgcgacgatttagtgttttcacaatgggttcccttctgattagtcatacaacctgtttgaattggtacgacaggttagcaaactttaatacgccgaacccctgttttgatcaactcctgatgattaatgagcagttttatgagaaaagtgtggcgcggatcatggtttaatcgaggaaaaacgccttttcctggatcataaagtggtagaacacattgcattcaaatcgcgcgtaatgaataaagatgtcagacaacttcctcaccgtaacgcatagtgctggtacggttgcgcccatctttcttgctgcgatacagacacgtatcggcttcgaccatcaatttattaaagtcatcggtcagcgttaggtagcttgcgcgaccactaccgacgccaatacttaccgtgagataaagcgttttttgttgccaggtgaatggttgcagttcaacgcctttacggattttttccgccattagcagaccatcgacaggattcacgctcggcactgcaacagcaaattcttcgccgcccattcgcgccaccagccccttatcaccgacaatcttctgaatatgccgggcaaacacgcttaacactttatcgccacattcatgtccatagttatcgttaatgcttttgaaatagtcgatatcaagcagcatgacagtcagatgttgtgtctgtttcaggcttggacttttcagcgcctcataaagaccggaccgactgtaaacctgagtcagaaaatcaaagtcggctcgcagcgcaacttgcttcattaggctattgatcgctgccacgctaaaagaaaccataattgggcatatcgccatcgtggcaataccgagacgtgcggagaacatttgcggaatggagaacgggctaccgacgctgatatcaatcacgctatttgccaccagtacgatttccaccgcaccggtgacaaaggtcaacagacatgttacctgcggcgtatagcgcactgcacaccagattaatgcaggcagcgggaacgccagactccccgctccgccaatgactacgctggcaataacgctcacaataagcgcgatggcgggcatcatctgttctgctttaaagcgcggcagcactccaggaatagccaacgtcagcatacaaggcacgatcaacacgcccgtactgaattgctcactgaaccagtccgcaagcaaaggccagaaatccagactatcaatactgaccgaaccaagatagcatgttcgctgacagcggcggcaaataaaggtaccctgggaatgctattttgtcgttttccgcaattctcatggctgattcatctgtacaaccagccagtgatagattaccgccacgatataacgttgttgttcttcgcttaagctaacaccctgcggaatgttatgccacttagccagacaaccgcgacagcaggtcgcggtggcgtgctgagcgataaacaccggatgcccgcgcatgggggtttgcttaccgtcattagccggtaatgccggagcaagacgtttagcgacaaaatccgccgcatgttgttcgatgactggcgcgcctttctccaggcaatactgacgctctttcatgcccagacgaaagcgagagcgaaatttactacgggataaacgcgcgaagagtggatcgagagactgcattaataaacgctacgccctaactgtttcgtcaattgttcaagaacggcaatacccgcaaggctgttacctgcatcatccagttccggactccagacagcgatggccatttcatgcggaacaatcgccacaataccgccaccaacgccagatttcgccggtagccccacccgccaggcaaactcccccgcgttctggtacataccactggtcgccatcagcgcgttaatttgccgcgcctgcattggcgtcaccactggttcatcaatatgaatagctttcccctgattagccagaaagacaaacgtccgggccagctctacacagctcattttcagagcgcagtaatgaaagtagttttgcagaacggttgtcacgtcatgatggaaattgccaaagctcttcatcagccaggcgatagccgcatttcgcgcggaatgttcaaattcggaacgcgctaccaccgtatcgtaggaaatatcagacacaccgcttaagccgcgcacgacttccagcatacgttgccgtggtgcgcttaatcgcccttgcaacatatcgcagaccaccagcgcaccggcattaatgaacggattacgcggtataccctgctccatttccagttgcactaaggaattgaacggacttccagacggatctttgccgacgcgttgccagatttcctcttcggagtaatgacgcatggcgacaacgagactcagcactttggaaatagactgaatggaaaaacgttcttgcgcgtctccggcctgaaaaagctgtccgtcaacggtacagatagcaatccccaatcgggaaccgtctactgtagccagcgccggaatataatccgcgactttaccctgaccaatgagcggccgcacttgccgcaagatgttttctaaaattgcattatccatggcgactgccactttctactcctggaccgcaggtctgaaaagacctgcgagtatatcagagctgaatatgtcgcgtcagatccggtctttccacaccgtctggatattacagaattcgtgtaagccgaaatgggaaagctcacgaccaaagccactctttttcacgccaccaaaggccactcgcgcgtcgctggcacaataaccattgataaacaccccaccgcattccagacgtgccgccatctgtctggcctgtgtttcgtcagtggtaaaaatggtcgcactaaggccgaactcactatcattagccagttccagtgcatgttctgcatctttcgcaatggtgattgccgcaacggggccaaacatttcttcccgaaacgcggtcatttctggggtaacattcgccagaaccgttggcggatagtagttacctgccccagccatcttttccccgcccagtaacaaacgcgcaccctgcgccagggttttctccacctgatgatgcagctcatcacgtaaatcaaaacgagccattggtccgagagcgttctcttcgtcacggggatcgcccattttcaaggctgccgcagctgccacaaaacgttcggtaaatgcgctagcaattccctcttcgataataaagcgttttgccgctgcacatacctgtccggtattctgataacgtccggctaccgccgctttcaccgccagttccagatcggcatcgttaagcacaataaacggatcgctaccgcccagttccagtacgcattttttcagtgccgctccagcctgtgcgccaatagccgctcccgcacgaacacttccggtcaccgtgacagcagcaatgcggctgtctttaatcatctgactgacaccgtcgttgtcggcattcagccagccatatacgccttgtgggatacccgcatctttaaacacctgggcaatgagctgtgcacagcccatcacattcggcgcatgtttaagtaagtagccgttacctgcaagaatgatgggaacagcgccacgcatcacctgccataacggaaaattccacggcataatcgccagaatcgtccccaacggtcgatactcaataaccgcctgctgattttccaccagcgtaggttccgccttcagcattgccggaccatgttctgcataccagtcacacaaattcgcgcttttcgccacttcagcgcgcgcctggttgattggtttgcccatttcgcgggtgatcatttgcgccatttcttcgctacgagcgcgcagagccttaccgatatcacgcagtttttcagcacgataatctatatttgtctcgcgccagtcgcgaaagcctgctgccgccagctgaagtgcgttttcgatatcgtcagcgccagcccacggcagcacagaaagttgttcacccgtggcaggatttatgctaattgcatgagttgccggagtaatggtcatcggggtatctcctttatgagtcatggtatgaagatacgcagatttactcttgctttaaaatgaataatattaagccacttattcacgaatcgagaatgctatggatctgacccaactggagatgttcaacgcggttgccgaagctggcagcataacccaggctgcagcaaaagtgcatcgcgtgccgagcaatctcactacccgtctgcgccagctggaaacagaactgggggttgatctgtttattcgcgagaatcagcgtttacgtctctctcctgccgggcataactttttacgctatagccaacaaattctcgcgttagtggatgaagcgcggagcgttgtcgctggcgatgagccgcaaggtttattttctcttggtagcctggaaagcaccgctgcagtgcgcattccagccacgctggcggaattcaaccgtcgttatcccaaaattcagtttagtctttccaccggcccttccggcactatgctggatggtgtactggagggaaaactgaatgcggcgtttattgatggacccattaaccatactgccatcgacgggataccggtataccgcgaggaactgatgatcgtcacgccacaaggatatgcgccagtaacccgtgccagtcaggttaatggcagtaacatttatgccttccgcgccaattgtagctatcgtcgccacttcgagagctggtttcatgctgacggtgccgctccgggaactatccatgagatggagtcttatcacggaatgttggcctgtgtgatcgcaggagcaggcattgcgcttattccgcgctctatgctggaaagtatgccggggcatcaccaggttgaagcgtggccgttagctgagcaatggcgttggttaacaacctggctggtctggcgtcgtggtgcgaaaacacgtccgctcgaggcatttattcaactgctggatgtgcctgacagcgcaagacagggatatcaatgagctatttttgatagttcttgcggttaatatgctctatatagtgatgttccgatgacttatgactatatggggcaaatatggttacgccagtaagcatcagcaattacatatctcttcctgatgattttcccgtacgtaatattgcaccgcaggtaaaagaagttttaaaggattttattgatgcacttagtacaataatatgtaatgaagagtggcgcacgtctttaaacatcaacagtgccacaaaaaagatatttaataaccttgacaacttaagttatattcagaggacttcttttcggggtaacgacacgctatacaatgaaaaggttcagtttaaactcacttatcccgccaggaatggaagacacaaagaaaatattgaatttcaggtagtaataaatttaagccctatttatttagataattttcgccatgatggagaaattaatattttttgcgctcccaacccaaagcctgtcactatggggcgcgtatttcagaccggcgtcgagcgtgtactctttctgtttctgaatgattttattgaacaatttccaatgatcaaccctggtgttcccatcaaaagagcgcatacaccacatattgaacccctgcctagcgatcaccataccgctgcagattacttacgccagtttgatttgcttgtcctgaattttatctctcgcggtaattttgtcatactcccccgattatggaataactctgaggttcacagatggttcgtcaataaagatcctaacttgatcaccgccattctcgacataacggacagcgaattaaaagaggatttgttgcaaagcctgatggatagtttaggttctaacaaacatgtactacccgaagtctgcatctgctttttatcccttttagcagaacaagaatctcctcattttcagaacttgtttttatttttcgccaatatgttattgcactatcaccaatttatgaatcccaatgaaagtgatttgaatgacgtgttgatgccagcaagtttaagtgatgataaaattatcaaacatatggcgcgcaggaccctcaaactgtttgtaaaaaatgaaacaccgccaaaagttactcacgaagacctggtgaaaaacaggcctcgctcccctgtcagaccacctatacccgcaaccgccaaaacgccagacctccctgaacgtcattaaaccgtgatgttaccgactctctgacgcgtgaaagaatcagcgtcagagaaacggaaaacgcgatccagatcacaaatgcattgtattcacatcattaaccgttttaagatcatttcatcactttttcgcaactcacccgataatctgttatgacaacaaacactgtttcccgcaaagtggcgtggctacgggtcgttacgctggcagtcgccgccttcatcttcaacaccaccgaatttgtccctgttggcctgctctctgacattgcgcaaagttttcacatgcaaaccgctcaggtcggcatcatgttgaccatttacgcatgggtagtagcgctaatgagtttgccttttatgttaatgaccagtcaggttgaacggcgcaaattactgatctgcctgtttgtggtgtttattgccagccacgtactgagctttttgagctggagctttaccgttctggtgatcagtcgcattggtgtggcttttgcacatgcgattttctggagcattacggcgtctctggcgatccgtatggctccggccgggaagcgagcacaggcattgagtttaattgccaccggtacagcactggcgatggtcttaggtttacctctcgggcgcattgtgggccagtatttcggttggcgaatgaccttcttcgcgattggtattggggcgcttatcacccttttgtgcctgattaagttacttcccttactgcccagtgagcattccggtagtctgaaaagcctcccgctattgttccgccgcccggcattgatgagcatttatttgttaactgtggtggttgtcaccgcccattacacggcatacagctatatcgagccttttgtacaaaacattgcgggattcagcgccaactttgccacggcattactgttattactcggtggtgcgggcattattggcagcgtgattttcggtaaactgggtaatcagtatgcgtctgcgttggtgagtacggcgattgcgctgttgctggtgtgcctggcattgctgttacctgcggcgaacagtgaaatacacctcggggtgctgagtattttctgggggatcgcgatgatgatcatcgggcttggtatgcaggttaaagtgctggcgctggcaccagatgctaccgacgtcgcgatggcgctattctccggcatatttaatattggaatcggggcgggtgcgttggtaggtaatcaggtgagtttgcactggagtatgagcatgattggttatgtgggcgcggtgcctgcttttgccgcgttaatttggagtatcattatatttcgccgctggccagtgacactcgaagaacagacgcaataattgaaaggcccattcgggccttttttaatggtacgttttaatgatttccaggatgccgttaataataaactgcacacccatacataccagcaggaatcccatcagacgggagatcgcttcaatgccacccttgcccaccagccgcataattgcgccggagctgcgtaggcttccccacaaaataaccgccaccaggaaaaagatcagcggcggcgcaaccatcagtacccaatcagcgaaggtactactctgacgcactgtggacgcgctgctaataatcatcgctatggttcccggaccggcagtacttggcattgccagcggcacaaaggcaatattggcactgggttcatcttccagctcttcgctcttgcttttcgcctccggactatcaatcgctttctgttgcggaaagagcatccgaaaaccgataaacgcgacgattaagccgcctgcaattcgcagaccgggaatgctaatgccaaatgtatccatcaccagttgcccggcgtaatacgccaccatcatgatggcaaatacgtacacgctggccatcaagctctgacgattacgttcggcactgttcatgttgcctgccaggccaagaaataacgcgacagttgttaatgggttagctaacggcagcaacaccaccagccccaggccaattgctttaaacaaatctaacattggtggttgttatcctgtgtatctgggttatcagcgaaaagtataaggggtaaacaaggataaagtgtcactctttagctagccttgcatcgcattgaacaaaacttgaaccgatttagcaaaacgtggcatcggtcaattcattcatttgacttatacttgcctgggcaatattatcccctgcaactaattacttgccagggcaactaatgtgaaaagtaccagcgatctgttcaatgaaattattccattgggtcgcttaatccatatggttaatcagaagaaagatcgcctgcttaacgagtatctgtctccgctggatattaccgcggcacagtttaaggtgctctgctctatccgctgcgcggcgtgtattactccggttgaactgaaaaaggtattgagcgtcgacctgggagcactgacccgtatgctggatcgcctggtctgtaaaggctgggtggaaaggttgccgaacccgaatgacaagcgcggcgtactggtaaaacttaccaccggcggcgcggcaatatgtgaacaatgccatcaattagttggccaggacctgcaccaagaattaacaaaaaacctgacggcggacgaagtggcaacacttgagtatttgcttaagaaagtcctgccgtaaacaaaaaagaggtatgacgatgtccagacgcaatactgacgctattaccattcatagcattttggactggatcgaggacaacctggaaagcccactgagtctggagaaagtgagtgagcgtagcggttactccaaatggcacctgcaacggatgtttaaaaaagaaaccggtcatagtttaggccaatacatccgcagccgtaagatgacggaaatcgcgcaaaagctgaaggaaagtaacgagccgatactctatctggcagaacgatatggcttcgagagccaacaaactctgacccgaaccttcaaaaattactttgatgttccgccgcataaataccggatgaccaatatgcagggcgaaagccgctttttacatccattaaatcattacaacagctaattgaaaacgtgacaacgtcactgaggcaatcatgaaaccacttagttccgcaatagcagctgcgcttattctcttttccgcgcagggcgttgcggaacaaaccacgcagccagttgttacttcttgtgccaatgtcgtggttgttcccccaagccaggaacacccaccgtttgatttaaatcacatgggtactggcagtgataagagcgatgcgctcggcgtgccctattataatcaacacgctatgtaatttgttctggccccgacatctcggggcttattaacttcccacctttaccgctttacgccaccgcaagccaaatacattgatatacagcccggtcataatgagcaccgcacctaaaaattgcagacccgttaagcgttcatccaacaatagtgccgcacttgccagtcctactacgggcaccagtaagcttaacggtgcaacccgccaggtttcatagcgtcccagtaacgtcccccagatcccataaccaacaattgtcgccacaaacgccagatacatcagagacaagatggtggtcatatcgatagtaaccagactgtgaatcatggttgcggaaccatcgagaatcaggctggcaacaaagaagggaatgattgggattaaagcgctccagattaccaggctcatcaccgccggacgcgtactgtggctcatgatctttttattgaagatgttgccacacgcccaactaaatgctgccgccagggtcaacataaagccgagcatcgccacatgctgaccgttcagactatcttcgattaacaccagtacgccaaaaatcgctaaggcgatccccgccaattgtttgccatgcagtcgctccccgaaagtaaacgcgccaagcatgatagtaaaaaacgcctgtgcctgtaacaccaggctagccagtccagcaggcataccgaagttaatggcacaaaaaagaaaagcaaactgcgcaaaactgatggttaatccataccccagcagcaaattcagtggtactttcggtcgtgcgacaaaaaagatagccggaaaagcgaccagcataaagcgcaaaccggccagcatcagcggtggcatgttatgaagccccactttgatgaccacaaaatttagcccccatacgaccactaccagtagcgccaacaccccatcttttcggctcattctaccgcctctgaatttcatcttttgtaagcaatcaacttagctgaatttacttttctttaacagttgattcgttagtcgccggttacgacggcattaatgcgcaaataagtcgctatacttcggatttttgccatgctatttctttacatctctaaaacaaaacataacgaaacgcactgccggacagacaaatgaacttatccctacgacgctctaccagcgcccttcttgccagcagcttgttattaaccatcggacgcggcgctacgctgccatttatgaccatttacttgagtcgccagtacagcctgagtgtcgatctaatcggttatgcgatgacaattgcgctcactattggcgtcgtttttagcctcggttttggtatcctggcggataagttcgacaagaaacgctatatgttactggcaattaccgccttcgccagcggttttattgccattactttagtgaataacgtgacgctggttgtgctcttttttgccctcattaactgcgcctattctgtttttgctaccgtgctgaaagcctggtttgccgacaatcttagctccaccagcaaaacgaaaatcttcagtatcaactacaccatgctaaacattggctggaccatcggtccgccgctcggcacgctgttggtaatgcagagcatcaatctgcccttctggctggcagctatctgttccgcgtttcccatgcttttcattcaaatttgggtaaagcgcagcgagaaaatcatcgccacggaaacaggcagtgtctggagcccgaaagttttattacaagataaagcactgttgtggtttacctgctctggttttctggcttcttttgtaagcggcgcatttgctagttgcattagtcaatatgtgatggtgattgctgatggggattttgccgaaaaggtggtcgcggttgttcttccggtgaatgctgccatggtggttacgttgcaatattccgtgggccgccgacttaacccggctaacatccgcgcgctgatgacagcaggcaccctctgtttcgtcatcggtctggtcggttttattttttccggcaacagcctgctattgtggggtatgagtgctgcggtatttactgtcggtgaaatcatttatgcgccgggcgagtatatgttgattgaccatattgcgccgccagaaatgaaagccagctatttttccgcccagtctttaggctggcttggtgccgcgattaacccattagtgagtggcgtagtgctaaccagcctgccgccttccagcctgtttgtcatcttagcgttggtgatcattgctgcgtgggtgctgatgttaaaagggattcgagcaagaccgtgggggcagcccgcgctttgttgatttaagtcgaacacaataaagatttaattcagccttcgtttaggttacctctgctaatatctttctcattgagatgaaaattaaggtaagcgaggaaacacaccacaccataaacggaggcaaataatgctgggtaatatgaatgtttttatggccgtactgggaataattttattttctggttttctggccgcgtatttcagccacaaatgggatgactaatgaacggagataatccctcacctaaccggccccttgttacagttgtgtacaaggggcctgatttttatgacggcgaaaaaaaaccgccagtaaaccggcggtgaatgcttgcatggatagatttgtgttttgcttttacgctaacaggcattttcctgcactgataacgaatcgttgacacagtagcatcagttttctcaatgaatgttaaacggagcttaaactcggttaatcacattttgttcgtcaataaacatgcagcgatttcttccggtttgcttaccctcatacattgcccggtccgctcttccaatgaccacatccagaggctcttcaggaaatgcgcgactcacacctgctgtcacggtaatgttgatatgcccttcagaatgtgtgatggcatggttatcgactaactggcaaattctgacacctgcacgacatgcttcttcatcattagccgctttgacaataatgataaattcttcgcccccgtagcgataaaccgtttcgtaatcacgcgtccaactggctaagtaagttgccagggtgcgtaatactacatcgccgattaaatgcccgtaggtatcattaaccaatttaaatcggtcaatatccaacaacattaaataaagattcagaggctcagcgttgcgtaactgatgatcaaaggattcatcaagaacccgacgacccggcaatcccgtcaaaacatccatattgctacggatcgtcagcaaataaattttgtaatcggttaatgccgcagtaaaagaaagcaacccctcctgaaaggcgtcgaaatgcgcgtcctgccagtgattttcaacaatagccagcattaattcccgaccacagttatgcatatgttgatgggcagaatccattagccgaacgtaaggtaattcatcgttatcgagtggccccagatgatcaatccaccgaccaaactggcacagtccataagaatggttatccgttatttctggcttactggcatctctcgcgaccacgctgtgaaacatactcaccagccactggtagtgggcatcgatagccttattgagatttaacaagatggcatcaatttccgttgtcttcttgatcattgccactcctttttcacagttccttgtgcgcgctattctaacgagagaaaagcaaaattacgtcaatattttcatagaaatccgaagttatgagtcatctctgagataacattgtgatttaaaacaaaatcagcggataaaaaagtgtttaattctgtaaattacctctgcattatcgtaaataaaaggatgacaaatagcataacccaataccctaatggcccagtagttcaggccatcaggctaatttatttttatttctgcaaatgagtgacccgaacgacggccggcgcgcttttcttatccagactgccactaatgttgatcatctggtccggctgaacttctcgtccatcaaagacggccgcaggaataacgacattaatttcaccgctcttatcgcgaaaaacgtaacggtcctctcctttgtgagaaatcaaattaccgcgtagactaacgctagcgccatcgtgcatggtttttgcgaaatcaacggtcattttttttgcatcatcggttccgcgatagccatcttctattgcatgaggcggcggtggcgctgcatcctgttttaaaccgccctggtcatctgccaacgcataaggcatgacaagaaaacttgctaatacaatggcctgaaatttcatactaactccttaattgcgtttggtttgacttattaagtctggttgctatttttataattgccaaataagaatattgccaattgttataaggcatttaaaatcagccaactagctgtcaaatatacagagaatttaactcactaaagttaagaagattgaaaagtcttaaacatattttcagaataatcggatttatatgtttgaaaattattatattggacgagcatacagaaaaagcaaatcacctttacatataaaagcgtggacaaaaaacagtgaacattaatagagataaaattgtacaacttgtagataccgatactattgaaaacctgacatccgcgttgagtcaaagacttatcgcggatcaattacgcttaactaccgccgaaagttgcaccggcggtaagttggctagcgccctgtgtgcagctgaagatacacccaaattttacggtgcaggctttgttactttcaccgatcaggcaaagatgaaaatcctcagcgtaagccagcaatctcttgaacgatattctgcggtgagtgagaaagtggcagcagaaatggcaaccggtgccatagagcgtgcggatgctgatgtcagtattgccattaccggctacggcggaccggagggcggtgaagatggtacgccagcgggtaccgtctggtttgcgtggcatattaaaggccagaactacactgcggttatgcattttgctggcgactgcgaaacggtattagctttagcggtgaggtttgccctcgcccagctgctgcaattactgctataaccaggctggcctggcgatatctcaggccagccattggtggtgtttatatgttcaagccacgatgttgcagcatcggcataatcttaggtgccttaccgcgccattgtcgatacaggcgttccagatcttcgctgttacctctggaaaggatcgcctcgcgaaaacgcagcccattttcacgcgttaatccgccctgctcaacaaaccactgataaccatcatcggccaacatttgcgtccacagataagcgtaataacctgcagcatatccgccaccaaaaatatgggcgaaataactgctgcgatagcgtggcggtatagcaggaagatccatattttccgccaccagcgcccgcaattcaaaatcatcgacatcctgcattgcttcgttttcttccaggcaatgccagcgcatatcgagaagtgcggcgctaagcagttcgctcatctcataccctttgttgaacaggctggcattacgcattttctgttgcagttcgtcaggcattgctgccccgctctgataatgccgggcgtagcgagcgaatacctgcggatgcgttgcccagtgttcgttgatttggctcggaaattcgacaaaatcacgcggcgtgttggtgccggaaagcgtggcataacgctggcgggcaaaaaggccgtgcagcgtatgaccaaattcatggaataaggttatgacatcatcccagagtaacaacgcaggctcaccggcagcgggtttctgataattgcagacgttataaattaccggatgtgttttattaagcgtactttgctcaacaaaattgcccatccatgcaccgccgcttttactatcacgggcgaagaaatcaccgtaaaataacgccagccccacgccattatgatcaaaaatttcccacacacgaacgtcaggatggtagacaggaatatcaaaacgttcgacaaacttaataccgaagagctgattcgcggtccagaatacaccttcatttaacaccgtgtttaattcaaaatatggcttgagctgcgcctcatcaagatcaaatttctcccgccgtacctgttccgcataaaatgcccagtcccacggctgcgcgctaaacccgccctgctgcttatcgataaccgcctgtatggaggctaattcatcgctcgcacgttgacgcgccgctggaacaatttcccgcataaagttaagtgctgcttcaggtgtttttgccatctgatcggcgattttccatgcggcataatgaggaaaaccaagtagtgttgcctgttgtgcacggatctccaccagacgttgaatgatagcgcgggtatcattggcatcatttttttccgctcgcgtccagcccgcaataaacagtttttcacgcgtcgcacgatcgcgcatttcggcaagcgccggttgttgggtggtattcagcagcggaatcagccatttgttatccagacctttctcgcgagccgcctctgccgccagcgcaatctcttgctcactcattcctgccagctgcgcgatatcgttcacaaccagaccgccggatttatttgctgccagtaatcgctggttaaactggctggtcagggtcgcagcttctgtattcagtacttttaattttgctttatcagcttgcgcaagtttggctccggcaaggacaaaacgttgatgaatcacctccaccaggcggatggattcactatcaagccccagggattcacggcgctgccagacagcatctacccgcgcgaataattcaccgttcagatagatatcattagccagttccgccagttcagcggaaaactgctcgtcaagacgctgtaattcatcattggtatgcgccgcagtcatcgcaaaaaagacgctggtaacgcgggtaagtaattctccgctttgttccagtgccagaatagtattgttgaaatcaggcatttgcgggttaagcgcgatggcagcaatttctgcccgcttttgctgcattccctcatcgaatgccgggcgatagtgatgattggcaatttgatcaaaatggggagccagatacggcagtgtgctttgcacaaggaaaggattcattgttgtcattttcttctcctgaacgcgaggtgttccatagcgtaggcttactgataacggagtgcaatcttgcaatccagtattacccgctcttaagcatcccgtgctatgttattgacacacaaaagcgttgaggaacagtgagaagcgcagtgcccagccatcccgatactgctgctttcaccaaatccttagtgcttctttcgtgtttttctattgtcataatggttatctctaaaaaagaggtaagatgcgtactacttactcgccgttattggtattattcagaaaaagtgagtaagactttgcagcaatgtttttgatcctgttcaaataaactaatggcatcagcaacatgctggaaatcaaacgtatgggtaattaatttttctggtttaattaaccctttacttaaccagtcgataacgatcgggaatttatttgcatttaagcgactagagaaaatagagagttcttttccggtaattccttgctgaatcacttcagacggttcactggagaaccccatcaatacaatacgtgccgctggagaagccagcgttacggcctctttcaggatagaaggatgacaagccgcatcgataattaatgtcggcttgatgcctttttcagtgaaaatctcgccaagcggtgtctggctgttattaatcgcccagtcagccccgctctctttcgctttttccagtcgttcatcaatgcgatcggcaacaatcacatttttaacgttatagacgccttttaatacctgaacgatcgtcaggccgattggaccggcaccataaaccagaacggtatcattttcagtcggttgaccatgtccggttacgttagccgcaatggtaaaaggttcgatcattaccgcatattgatcggccactgcttcaggaattttccacgcattttttgccggaaccacggcatattcactgaaaccaccgtcagcgtgcacacctaatacagccagtgtcgtacaaacgttcggtttacctatagagcacggatagcaatgcccacagctgaccaccggatcgacagcaacacgttcaccgactctggcgctttccacgccttcacccactgcatcaatgacgccaaagaattcatgaccaatgacgcgcggatatttcgcaaaaggattatgcccacgataaatatggctatcactaccacaaattccggcaagtttcacttttactcgtacttcacccgcactcggggtgggtatttcacgttcgacaatcgccagttgattcggtttttcaattaatatgcttttcattatcttactccttaccagttccacagcgtgccatcttccagacgtgcgactggtagataagcaggttcatagggatatttcgccgccagcttttcatcgaattcgataccaagacccggtttgtctcccggatgcatatagccgttatcgaaagtccagttgtgcgggaagacttcgagcatttgttcggaataacccatgtattcctggacaccgaaattggggacccacagatcaaagtgcagcgccgcagccatgcagactggactcaaatcggaaggaccgtgactgccagtacgtacctgatacaggctagcaaaatcggcaatccggcgcataccggtaattccgcctgcatgggtcagcgtggtgcggatataatcgatgagttgctcttcaatcagttgtttgcagtcccagatgctgttgaagacttcacccactgcgatgggtgtgacggtatgttggcgaatgagacggaagcattcctggttttccgcaggcgtcgggtcttccatccagaacatgcgataatcttcaatgcttttaccaaagcgcgccgcttcaataggcgttaagcgatggtgcatgtcatgcagcaaatgttcattaaaaccaaacttgttacgtaccgcgtcaaacaatttcggcatgaaatcgaggtatttctccgtgctccacagctgctcttccggccactgtcctttggttgcgggttcataagccagacctttacctttgctcatgccgtaggtggttttcataccagggattccgcactgcacgcggatggctttgaatccaagctcttgatgacgggcataatcatccagagcttcatcaatactgtgaccggtggtatggcaataaaccatcaccccttcacgagacgcgccgccgagtaactggtaaagcggcatgttggcagctttggctttaatatcccacagcgccatatcaaccgcactaatggcgctcatcgtaaccggaccgcgacgccagtaagcacctttatagaaaaactgccagatatcttcgatacggtgcgcatcgcgaccaataagctgcggacaaaggtgatcctgcaaataagaggccacggaaagctcacgtccattgagggtggcatccccaaggcccgtaataccgtcctcagtggtgatttttaatgtgacgaaattacgccccggacaggtaacaaaaacttcagcctttacgatcttcatgttcgattccttgcatcgcttgtcgtgatgcatgaaatctacgcaactgagctactaccatacaagtataaagatcgaaaaaagccggagtgatcacaaaaaaaggcgtatatttgcgctgtgaatggttgacaaaagatgaaatagaataccttttgtcagctgacacttcctcttatcttattgataaaatggatttatgttcttacgtgcgcccccagcccgcaacaatgatcaacatgccgcaaagcgcaatcaacgcacccgtccagtcataaagagtcagtttcacgccatccacaacgcgcagccacatcaacgccgtgcagacataaacgccaccataagccgcgtaaacacgcccactcgccgctggatgcaacgttaacaaccagacaaacagcgccagactaatccccgccggaagcaacagccagatactggcgtttcgttttaaccacaaccagggcagaaagcatccaataatttcacacagcgcagtagcaaaaaatagtaacgttgttttaatcatctttgtctcttattgacatcatgtatagttatagggcgacataatatcatcaatataaacaccctcctggtacgttttgcgtccgcagtggatggtgtagaatcacctttaatcattcatacagggaatgaattatgaaaatcactctcagcaaacgaatcggcctgctcgctattctgctgccttgcgcactggcattgagcacaactgttcatgccgaaactaacaaactggtgattgagtctggcgacagtgcacaaagccgccagcacgccgctatggaaaaagagcaatggaatgacacgcgcaatctgcgccagaaagtgaataaacgcactgaaaaagagtgggataaagccgacgccgcttttgataaccgcgataaatgtgagcaaagcgccaacatcaatgcctactgggagcccaatactttgcgctgcctggaccgtcgaactggccgcgttattaccccctaacctgttattgatttaaggaatgtaaggacacgttatgccaagcgcccacagtgttaagctacgcccgctggagcgtgaagatttacgctatgtacatcaactcgacaataacgccagtgtgatgcgttactggtttgaggaaccctacgaagcctttgttgaactctctgatctgtatgataagcatattcacgatcagagcgaacggcgctttgtggtggaatgtgacggcgaaaaagccggtctggtggagctggtggaaattaaccatgttcatcgccgcgcagaatttcagataattatctccccggagtatcaggggaaaggtctggcaacccgtgccgccaaattagcaatggactatggctttaccgttctcaatctctataagctgtatctgatcgttgataaagagaatgaaaaagcgattcacatttaccgcaagcttggctttagcgttgaaggtgaattgatgcacgagttctttattaatggtcaatatcgtaatgccattcgcatgtgtatattccagcatcagtatctggcagagcacaaaacaccgggtcagactctcctgaagccgaccgcacaataacattaataataatcgatcgtatttttgatggtgtaaacccgttcgacggcgggttttactccttcatcaacaatgattagctgacagtccaccggattagcgtgactgtcatattcacagctctgttttacattaccaacccgttgattattcagtaaagtaaccgctgtgtaatctaattttttgatcggatccgtacttggcgtggcgctgacagataatgttttgtcgttacttttcgtggttttacccagcggataaccctgatcatcatagcgatattccatctgcatttgtttgctgctggctttaatcacgaagccattatcatcggtttcccaactcaccccggcagaaggtaattctgctagctggcattttccctgtaaacgtactctcttctccagcgtctcggcatcacggtaataattggcgtccagtaccagagcgaccacggtattattttccagatccagtaattcgagactatcaaaacagccttcttcgctcaaagtcccagaaacacgtttcgtcacttcaccttgctcatccattaatgtctgagtgaaatcttttaccggaccacgcagcggatcaaaatcgaattcattagagaaactggccatctcaggggtaaaactaagtgttacctctgtgcggtcacatcctgtgaggaatatcgcgagtaagcatggtagtaatttgtatttcacaacagtcaccagagagtagagatgattctcaatcatagtagcaaatacagtactttacacgttaaatgctatgcttaaagaagttatcttcgcgtaaggagcttatgatgaaactcagtacctgctgtgccgcgcttctgctcgccctcgccagtcccgcggtactcgccgcgccgggatcctgtgagcgcatacagagcgatataagtcagcgcattatcaataatggcgtacccgaaagcagcttcacgttaagtattgtacccaatgaccaggttgatcagcctgattcccaggtcgtcggccattgcgctaatgatacgcataaaattctctatacccgcaccaccagcggtaacgtctctgctcccgcgcagtctagccaggatggcgcgcctgccgaaccgcagtaacacattatcgactgaacgccggatatgacaaatccggcgatttgaacatacaacataatcccaccttattactcatacccttctattgatatggattaataattcttaacccaaaatgggtagactccctctattgttagcgcgctaaatattcaatatataaacttttatataacgataaagaacagggagtgagttatgtccaaaaatgaacgaatggtgggcatcagccgcagaacactcgttaaatctaccgcgataggttctctggcgctggctgcaggcggtttttctttgccgtttaccctgcgcaatgcagcagcagcggtacaacaggcccgcgaaaaagtggtctggggtgcctgttccgtcaactgtggtagccgctgtgcacttcgtctacatgttaaagataatgaagtgacctgggtggaaactgacaataccggcagcgatgagtacggcaaccatcaggtacgcgcctgtttgcgcggtcgctccatccgccggcgtattaatcatcccgatcgcttgaattacccaatgaaacgcgtgggcaaacgcggcgaaggcaaattcgaacggattagctgggatgaagccctggatactatcgccagtagcctgaagaaaaccgtcgaacaatatggcaatgaggctgtatatattcagtactctagcgggatcgttggcggcaatatgacccgctctagcccaagtgccagcgcggtcaaacgcctgatgaactgctacggcggtagtctcaaccagtatggctcctacagcactgcgcaaatttcctgtgccatgccctacacctacggcagtaatgatggcaacagcaccacggatattgaaaacagcaagctggtcgtgatgtttggtaacaacccggcagaaacccgcatgagcggtggtggcatcacttatcttcttgaaaaagcgcgcgagaaaagcaacgccaaaatgattgttatcgatccgcgatataccgatacggctgccggtcgtgaagacgaatggctccctattcgcccgggcaccgatgccgcgctggttgcgggtattgcctgggtattgattaacgaaaatctcgttgatcaaccttttctcgataaatactgcgtcggctatgacgaaaaaaccttacccgcagatgcacccaaaaatggtcactataaagcctatattcttggtgaaggtgacgataaaacagcgaaaacgccgcagtgggctagccaaattaccggtatcccggaggaccgtatcatcaaactggcgcgtgaaattggcacagcaaaacccgcttatatctgccagggctgggggccacaacgccaggcaaacggcgaactgactgcacgcgctattgctatgttacctattttgacgggcaatgtcggcatcagcggcggaaatagtggcgcgcgtgaaagcacctataccattaccatagaacgcctgccggtgctggataatccggtcaaaacgagtatctcctgcttcagctggacagatgctatcgatcatggtccgcaaatgacggcaatccgcgacggcgtccgcggcaaagataaactggatgtgcccattaagttcatctggaactacgcgggaaataccctcgttaatcagcattctgacatcaacaaaacgcatgaaattctgcaggacgaaagcaaatgcgaaatgattgtggtcatcgaaaactttatgaccagtagcgcaaaatatgccgacattctgctgccagacctgatgaccgttgagcaggaagatattattcctaacgactacgccggtaacatgggatatctcattttcctccagcctgtcaccagcgaaaaattcgaacgcaaaccgatttactggatcctgagtgaagtcgcgaaacgtcttggacctgacgtctatcaaaagttcacagaaggtcgcacgcaggaacaatggttacaacatctgtacgccaaaatgcttgccaaagatccggcgttaccgtcttacgacgaactgaaaaaaatgggtatctataagcgtaaagatcccaatggccattttgtcgcctacaaagcatttcgtgacgaccccgaggcaaatccacttaaaacgccttccggtaagattgaaatttattccagcaggctggcggaaattgcccgtacctgggaactggaaaaagatgaagtgataagcccattgccagtttatgccagtacctttgaaggctggaactcccctgaacgtagaaccttcccactgcaactgtttggtttccattacaaatcccgtactcacagcacctacggcaatattgatctcctgaaggctgcctgccgtcaggaggtgtggatcaaccctatagatgcgcagaaacgtgggattgccaacggcgatatggtgcgggtgtttaaccatcgtggcgaagttcggctaccagccaaagtaacaccacgtattctccctggagttagcgctatgggccagggagcctggcacgaggccaatatgtctggcgataaaatcgaccatggcggctgtgtgaatacgctaaccactctgcgccctagtccactggcgaagggaaacccgcagcacactaatctggtcgagatcgaaaaaatataacccacgacaaccataaattctggcatgacattttgtttgaaaagcaataagtgagtaatgatgaaaatccataccacagaggcgctcatgaaggctgaaatcagccgtagaagtctgatgaaaacctccgcacttggcagtcttgcgctggcaagcagtgctttcactctgccattttcccaaatggtccgggcggcagaggctccggtagaagagaaagcggtctggagttcctgcaccgttaactgcgggagccgctgtctgttacgtttgcatgtgaaagatgacaccgtgtactgggtggagtctgatacgacaggtgacgacgtctacggtaatcatcaggttcgagcgtgtttacgcgggcgctctatccgccgacggatgaatcatcctgataggttgaaatatcccatgaagcgcgtcggcaagcgcggtgaaggtaaatttgaacggataagttgggacgaagccctggataccatcagtgataatcttcggcggatcctgaaagattacggcaatgaggctgtacatgtcctgtacggaacaggcgtagatggcggaaacatcaccaacagtaacgtcccgtaccgtctgatgaactcttgcggtggttttctcagtcgctatggcagctacagtaccgcacagatcagtgccgcaatgagttatatgttcggtgccaatgatggcaacagcccggatgatatcgccaatacgaaactggtcgttatgttcggaaataacccggcagaaacgcggatgagcggcggtggtgtcacttactacgtcgagcaagcccgcgaacgtagtaacgcacgcatgatcgtcatcgatccacgttataacgacactgctgccgggcgtgaagatgaatggctgcccattcgccctggcaccgatggcgcactggcctgtgcgattgcctgggtactgattactgaaaacatggtcgatcagccatttctcgacaaatattgtgttggttacgatgaaaaaacgctgcccgccaacgcaccacgtaacgcgcattataaagcctatattctgggcgaagggcctgacggcatagctaaaacgccggaatgggcagcaaaaatcaccagcatcccggcagaaaaaattatccagttggcacgagagatcggtagtgcaaaacctgcttatatttgtcagggttgggggccacaacgacattccaacggcgagcaaacatcccgcgctattgccatgctttccgttctcaccggcaacgtcggcataaacggcggcaacagtggcgtacgcgaaggtagctgggatctgggggtagaatggttcccgatgctcgagaatcctgttaaaacgcagatttccgtctttacatggacagatgccatcgaccatggtacggaaatgaccgcgacccgtgatggtgttcgtggaaaagaaaaactggatgtccccatcaagtttttatggtgctacgccagtaacacattgatcaatcaacatggcgacatcaatcacacccatgaggtgcttcaggatgacagcaagtgcgagatgattgttggcattgaccacttcatgacggccagcgctaagtattgcgatatcctgttgcccgacctgatgccaacagagcaagaagaccttatctctcatgaatctgcagggaatatgggctatgtgatcctcgcccaacccgcaaccagtgcaaaatttgaacgcaaacccatctactggatgctgagtgaagtcgccaaacgcttaggaccagacgtttatcaaacctttactgaaggtcgcagtcagcatgaatggatcaaatatctccatgcgaaaacgaaggaacgtaaccctgagatgcccgactacgaggagatgaaaacgaccgggatctttaagaaaaaatgcccggaagaacactacgtcgctttccgcgcattccgtgaagatccacaggcaaacccgttgaaaacacctagcgggaaaatcgaaatttattctgaacgactggcgaagattgcagatacctgggaattgaaaaaagatgaaattattcatccccttcctgcgtataccccaggttttgatggctgggacgatcccctgcggaaaacctatccactgcagttaacgggcttccattacaaagcgcgtacccactccagctacggcaatattgatgtgttacagcaggcctgcccacaagaggtgtggatcaaccccattgatgctcaggcacgcggtatccgtcatggcgataccgtgcgggtatttaacaataatggagaaatgctgattgccgcaaaagtgactccgcgtattctgcctggcgttaccgccatcgggcaaggtgcgtggcttaaagcggatatgtttggtgaccgggtcgatcacggcggcagtatcaatattctgacctctcaccgccctagtccgctggcaaagggaaacccgagccacagcaatcttgtccagatcgaaaaggtttaaggagtagcccatgaccacacaatatggattttttatcgattccagccgctgtactggctgtaaaacctgcgaactggcgtgcaaagattttaaagatcttggcccggaagtcagtttccgccgtatttatgaatacgctggcggcgactggcaggaagataatggcgtctggcaccagaacgtgttcgcttattatctctccatctcctgtaaccattgcgatgaccccgcatgtacaaaagtctgccccagcggcgcaatgcataagcgtgaagatggctttgtggtggttgatgaagatgtttgtatcggctgccgctactgccacatggcttgtccgtacggcgcgccacagtacaatgctgaaaaagggcacatgacgaagtgcgatggttgttatagccgcgtcgccgaggggaaacaacccatatgtgtcgaatcctgcccgctgcgtgcacttgagttcggtccaattgaagagctgcgccagaagcacggcactcttgctgccgtcgcgccactgccgcgcgcgcatttcacaaaacccaatatcgttatcaaacctaacgccaacagccgcccgaccggcgataccactggttatctggctaatccggaggaagtgtaaaatgggaaatggatggcatgagtggccactggttatctttaccgtattgggtcaatgcgtagtaggcgcgctgattgttagcggaattggctggttcgccgccaaaaatgacgcagaccgtcagcgtattgtccgtggcatgtttttcctctggctgttgatgggcgtcgggtttattgcctctgtcatgcacctgggaagcccactgcgggcgtttaactccctgaatcgaatcggagcttctggtctgagtaacgagattgctgccggttccatattttttgccgttggcggattatggtggctggtggcagtcatcggtaaaatgccgcaagcgttggggaaactctggttacttttcagcatggcgctcggcgtcattttcgtctggatgatgacctgcgtgtatcaaatcgacaccgtgccaacctggcataacggttacactacgctggctttcttcctgacggtattgttgagcggtccaatacttgctgccgcaattctgcgggcagctcgcgttacatttaataccacaccatttgccatcattagcgttctggcgctgatcgcttgtgccggggtgattgtgctgcaaggtttgtctctggcgtctattcacagttccgtgcaacaagccagcgcactggtaccagattacgcctccttacaggtctggcgtgtggtattgttatgcgcaggtcttggatgctggctttgcccgctcattcgtcgccgtgaacctcacgttgccggacttattctggggctaatcctcatacttggcggtgagatgatcgggcgtgtgctcttttatggcctgcacatgacagtaggaatggctattgcaggttaacaaattggtgcggggcaacccgcacatttcaggatgttaggaatgacccattttagtcagcaagataatttttctgtcgcggcgcgcgtgttgggcgcgctgttttattacgctccagagagtgcggaagccgcacctctggttgcggtactcaccagtgacggctgggaaactcagtggcctctaccagaagcgagtttagcgccgctggtgacggcttttcagacacagtgtgaagagactcacgcccaggcctggcagcgtttgtttgtcggcccgtgggcactgccgtctccgccgtgggggagcgtctggctggatcgcgaatctgtgctgtttggcgatagtacattggcacttcgtcagtggatgcgcgagaaaggcattcagtttgaaatgaagcaaaacgaaccggaagatcattttggtagtctgctgttgatggctgcgtggttggcggagaatggtcgccagacagaatgcgaagaattgctggcatggcacctttttccgtggagtacacgttttcttgatgtttttatcgaaaaagcagaacaccctttctaccgtgcactgggtgaactggctcgcttaacgctggcgcaatggcaaagtcaactgttaattcctgtcgcggttaaaccgctgtttcgataagatcaccgtaatattgccggatggtgacgattacgcgcaatccggcaataataggttacagtgtcacgtttttttatctcttaaagcacgcactgcttttgcggctggcctcttttgccgcaaaatagtcgcccgtgtttcattgcccatttctgctcatgcatcatctacacatctatccggatctgcgcactatgttccaccgtctgcttatcgcaacagtcgtcggtattctcgcggcctttgccgttgccgggtttcgtcatgcgatgctgctactggagtggttgttcctcaataatgactccggcagtctggtcaatgcagcgacaaacctttccccctggcgacggttgctaactccggcgctcggcggactggcggcgggtttgttgctgatgggctggcagaaatttacccaacaacgccctcatgcgccgaccgattatatggaagcgttgcaaaccgatggacagttcgattacgcagcaagcctggttaaaagccttgcctctctgctggtagtaaccagcggcagtgcaattggtcgcgaaggtgcgatgattcttttagctgcccttgccgcctcctgttttgcccaacgttttacgccacgccaggagtggaaattatggatcgcctgtggggccgcggcgggaatggctgcggcctatcgtgccccgcttgctggcagtttatttatagccgaagtgctgtttggcactatgatgttggcctctctcggcccggtgattatttccgccgtcgtggcattgctggttagcaatctgattaatcatagcgacgcgttactctacaacgtacaactcagtgtgacggttcaggctcgtgactatgcgctgattatcagtacaggtgtgctggcaggtctgtgcggaccactgttgttaacgttaatgaacgcctgtcatcgtggatttgtgagtctcaaacttgcgccgccctggcaactggcactaggcgggttgatcgtgggtctgctttccctgttcacacctgcagtgtggggcaacggctatagcaccgtacaatcctttttaaccgccccaccactgttaatgatcattgccgggatcttcctttgtaaactgtgtgccgtgctggcgagtagcggttccggcgcacccggtggggtctttacaccgacgctatttatcggtcttgccattggcatgttgtatggtcgtagcctgggattatggttccctgatggcgaagaaattacacttttactcggattgaccgggatggcgacactgttggcggcgaccacgcacgcgccgattatgagcacgttgatgatatgtgaaatgaccggggagtatcagctactccccggtttattgattgcctgcgtaattgcgagcgtaattagccggacgttacaccgtgactctatctaccgccagcacactgcgcagcatagctaagcggatgtattgccccagttcacgctgttcggcgcgcggcagataaggcagttcaccaatgagcggtgccggaagttttttacccagcacatcaatgatttccgcataatgcgccagtcctgggttgattcggttagccacccagccaatgagcggcagcccgtcgttggcgatcgcctgagctgttagcagtgcatggttaatgcaaccttcctgaataccgacaaccatcaacaccggcagttgttcctgcactacccattcagagagtggacgcaaatcattcatcagactgcgccagccgccagtcccttctaccacgacatgatcgactttttcggtcaggtttgccaggccgttactaatgagggtgtaattgattgggcaactgtgcgccacgctactttcttcttcgcttaacgcgataggattaactgcttcataaggcagttcgatggtactaacactctgcaacaccagggcatctttattacgcagcccttcgggtgtctctttgctccccttcgctacgggtttatatcccgcaaccgtttttccctgggaggctaacgcttgtagcaatgcgcgggaaaccaccgttttccctacagaagtgtctgtaccggtaataaagaaacgcttcagcatcactaactccaccgttatgcttcacaaatataaaccaggaaaataattaaccttgaaagtctaagttatgctttcctggcccaaattgagatagcgcaaattttggtagaacagttaaaaaatgttaaccctgcaacagacgaatcaacaaagaaccgttatacatcgcgtcttttaccagtgcagcgcctgccatcgtgccctggttagaaaactgagtactctcaacgctgatgtgctgactatacgcaggaagggcctgctgacggatgctgtcactgatgaccgggaagaggatatctgccgctttacttaacggactgccaatcagtattttttgtgggttaaataaattcaccatgatggcaagaatgcgcccgacatgcgcgcccaccccggtaatgatgtcttttgccagtagatcgccgcgcaatgccgcctgacacaaactgtccacggttaacggttgtccatgtaacatgctgctcatggattgattaagacgcagctgtgccagctcaagaatactgtccacgctggcgatggtttcgaggcagccgtgattcccgcaataacagcgtttcccatacgggtcgacctgtgtgtggcctatttccacgagactactgctgcctgcgtgtagcagatgaccatcggtaatgacgcccgcccccacgttgtgatcgataaccacctgaatcacatcgcgcgccccgcgactggcaccaaacaaggcctctgccatcgtccatgcgctgatatcatgctgaatataaaccggaacgccggtatgctgctccagcgcctcgccgagcggcatctcttttacatcctcgtagaacggcatgcgatgtacaataccattttccgtatcaataattcccggcaaggttatggcaatgctagttagacgctcaagttttttctggtggcggataaaaaactgatcgatatgggaaataatacgatccagcaatggcaagtcatcttttaacgccagttcctggctctcttccaccaccagtttgctgctcagatcgcgcagagcaaggaaaatctccccgcgactaatgcgcagagaaagatagtgccaggcttcagtttcaaccaccagccccaccgccggacggccacggttccccgcttctttgatttccagctcttgcaccaggtgtgcttcgagcatctcacggacaattttagtgatactggcaggagccagttgcgccagacgggaaagatcgatacggctgactggaccaagctgatcaatcaggcgataaaccgcgcccgcgttggtctgctttatttgatcaatgtgcccaggctggttttcagcaaccaccgcatactccctatattttcgcgctccgaaataatctgtaggctatggtgaagcacttcaatacgtgtcgtcaaatttttacttaggcatgtgattaacagcacatttttcgggctttttcgctgaaatttccctcacctgagagcattcagcagatgaatacgaaagttacgcgcagccggactttgttcatgatgtttcggccagaccaaccacatttcagaaaccgcatcctcttcagcaatcggcacccagcgcatttcgttgagctgaacacgtttaaaactcgcaggcaaaatactaacacccagaccggcggaaaccagaccgatgatggtcattgcctcgcccacctcctgagtgatgacgggcgtcaaatggtaacgtcgcatcagcccgagaatatcgtcatacagccctgtcccgacgtgcggatcaaaaaagacaaagggttctttcgccagttcagccagcgttacattcgggttatttgccaggggatgatcgtgcgggatcatcgccataagcggttcatggacgatgactgcgtgttcaaggctctccggtaacgctgtgttacgcagcaatcccatatccagcgttccttcaatgagcggagcgatttgctcgcgagtgttcatttcgcgggtttgtaaatggacatcaggataatcacggcgaaacaggcttaacgtatcggacaccgcccgaataaaaggagcgctgctagtaaaaccaatgcgcaactcccccgcttcaccctgatgcagcctttcagcgcgagcggcagcgtcatccaccatagacaggatttgccgactatctgcaagaaactgttttcctgctgccgtcagcaatacactgcgattggttcgtgccagcagtcgggcaccaatttgttgctccagcgcctgaatctgctgacttagcggcggttggctaatattcaggcgggcagcggcgcgcccgaaatgcagctcttccgcaacagcaacaaagtaacgcagatgacgaagttcaatattcatatttaaaacatcttatttgagattattaatatattagacagaacaattcgattttcctaccctatgtataagcctgatctacaggcatatttagcaaggatttcaagtgagccgtactacaactgttgatggcgctccggcaagcgacactgacaagcaaagcatttctcagccaaatcaatttattaaacgcggtacgccgcaatttatgcgcgtcaccctggcgctgttctctgccggactggcaacatttgcacttctctattgtgtgcagcctatccttccggtgcttagccaggagtttggcttaacccccgcgaacagtagtattagtctgtccatttccacggcgatgttggctattggtttgctgtttactggcccgctatccgatgccattggtcgcaaaccagtgatggtcacggcgctactgttggcctccatttgtacgttacttagcacaatgatgaccagctggcacggcattttgattatgcgcgccttgattgggcttagcttaagtggcgtggcagctgttggcatgacttatcttagcgaggaaatccatcccagtttcgtggcctttagtatggggttgtatatcagcggcaacagtattggcggcatgagcggacgcttaattagcggtgtcttcacggactttttcaactggcgaattgctctggcggcaatcggttgtttcgcgctggccagcgcgttgatgttctggaaaatcctccctgaaagtcgccattttcgcccgactagcctgcgccctaagacgttgtttatcaactttcgtctgcactggcgtgaccggggattaccgttattgttcgcagaaggctttttgctgatggggagcttcgtcacgctgtttaattacatcggctatcggttgatgctctccccctggcatgtcagtcaggccgtggttggcttattaagcctggcttatttgaccggtacatggagcagtcccaaagccggaaccatgaccacccgctatgggcgtggtccagtgatgttgtttagcacgggggttatgctgtttggtttactgatgaccttattcagcagcctgtggctgatctttgccggaatgttactcttcagtgcaggattcttcgcagcccacagtgtagccagcagctggatcggcccccgcgcaaaacgcgctaaaggccaggcctccagcctgtatctgttcagttactatctggggagcagtattgccgggacgctgggtggtgttttctggcataactatggctggaacggcgtcggcgcatttattgctctgatgctggtcattgctctgctggtcgggacgcgtttgcatcgtcgtctgcacgcctgaaaaataagtccggactgcggtaaatacccgtccggacttattgccagctcaaaccaacgttaatagccatcctaaaatagacgaagcgccagccaattcccgcagcgcgtctagcgtcatcaggattataagtacccaaataaacggattcattttgctgtgtgtcatttattactgatgcgcagttattctactgctttgtaagtagtaaaatagttaacccgatcaagactactattattggtagctaaatttcccttaagtcacaatacgttattatcaacgctgtaatttattcagcgtttgtacatatcgttacacgctgaaaccaaccactcacggaagtctgccattcccagggatatagttatttcaacggccccgcagtggggttaaatgaaaaaacaaattgagggtatgacaatgaaaaaagtattagctctggttgttgccgctgctatgggtctgtcttctgccgcctttgctgcagagactacgaccacacctgctccgactgcgacgaccaccaaagcagcgccggcgaaaactacacatcataaaaaacagcataaagcagcacctgcccagaaagcgcaggcggctaaaaagcatcataaaaatacgaaagctgaacagaaagcccctgaacaaaaagcgcaggcagcgaagaaacacgccaagaaacacagccatcagcaaccggcaaaacctgctgcacaacccgcagcgtaagttttcaacagtaatgctggcgcgccccctcgcgcctgaaaattacggtgctaagcgggtaacgtttagcaccgcctttagcggagggtagtatggtgggccgttatcgctttgagttcattctgatcatccttattttatgcgcactgattaccgcccgtttttatctttcctgattgtagttatctgattttactcccactttcatcccgtcccgtctatagtatttatgagggtttgcttttaataatcataattacccaccagagtgtgatatgcgtacaaccattgctgtagtgttgggtgcaattagtttgacgtctgcttttgtgtttgcagataaaccagacgttgccagaagcgcaaacgatgaggtcagcaccctgttttttggtcatgatgatcgtgtgccagtgaatgacacgacccaaagtccgtgggatgcggttgggcaactggaaacggccagcggcaatttatgtacggcgacgctgattgcacccaatctggcattaacggcaggacactgtttattgacacctccaaagggtaaagccgataaagcagtggcgctgcgttttgtgagtaataaaggtctttggcgctatgagatccacgacatagaaggccgcgttgatccgacactgggaaagcggttaaaagcagatggggatggttggattgtacctcccgcagccgcgccgtgggacttcggattgattgtgctacgtaatcccccttctggcattacgccgttgccgttatttgagggagataaagccgcgcttaccgccgcattaaaagcggcaggtcgtaaagtgactcaggcaggctaccctgaagatcatctcgatacgttgtacagtcatcaaaactgtgaagtgactggctgggcgcaaacgagcgtgatgagtcatcagtgcgataccttgccgggtgacagcggtagccctctgatgttgcataccgatgacggctggcaattaattggggtgcaaagtagcgctcctgccgcgaaagatcgctggcgcgccgataaccgggccatttctgttaccggttttcgcgacaagctggatcaactgagccaaaaataatgttcaaacgctgcccgacagcgcgggcagcgtcttcatcaggcaagtttcaccatgatcattccagccaacagcaagaccaggccaatccagcctttacgatttaaccgttgaccaaacaagatccaacctgcggctaacgtggcggcaataccaaacccgccccacaatgcataagcgacagacaagtcgatccctttaacggcttgagaaagcgcactaaaggcagccagcaccgccgccagggagagcaagccaaatattttgcgacgaaagccgtcagaaaatttcaaaaagacgttagcaacgatttccagcacgattgccaatgccagccaggcggcgtgaacccattcaaactgcgccatggttcacctccagttcaggtttacgcgctttacgggtaccactttttatcaacacaatcccggcgaccagggtggttaacccggcaattttcatcaggcttaaactttcgtcgaataacaaaacgctaaacaaggtaataaataaaataccgataccttcccacagcgcataagctacgcctaaggcgatttttttaacggcgaaagagagaaatatatagctcagagaaatcatcaccagcattaaaataaagccgccatttccctcactgacgctcgcccatttcatactcagcgtaccggtaatttctgtagcaatagccagacctaataaaatccaataaatatacattgtccttctcctgcaagagaattattttaattttcgcttaattcagcgaaaccaaagtaaagtggtcaagccccgcgcatagcgcaagctttggcagaagaaaggactaaagcgcgttgcgccagtgctgctcacctacgagcaagatagtggatgaggtacgaagatgggtaaatgtagaaaataacgtcctgaacaaattgtccataatattacaattatccgcagtgttgcttctcgtcatcgcggatgataattgtcctcggtagttgaacacgcctgatttgtatcatagcttaagaattaactcaaaatattttcacttctttacctgagcggtttgattttcgttatgatgacggagcgaaaaagacattattattagcaaaggaagaaaaaacggggacaagcatggcaaagccgatcatcacgctcaatggcctaaaaatcgtcattatgttgggaatgctggtcattattctctgcggtatccgttttgccgccgagatcatcgtgccgtttattctcgcattatttattgctgttattcttaacccgctggtgcaacacatggtccgctggcgtgtgccgcgtgtactggcggtgagcattttgatgaccatcatcgtgatggcgatggtgttgctattagcttatctgggttccgcgctcaacgagttgacgcggacgttaccgcaatatcgcaactctattatgacgccgctgcaagcgcttgaaccgttgttgcaacgcgtagggattgacgtcagtgttgaccagctggcgcattatattgatccgaacgcggcgatgacgttgctcaccaacttattgacgcagttatctaatgccatgagtagtatatttttattgctgctgacggtgctgtttatgctgctcgaagtgccacaattgcccggaaaatttcagcaaatgatggcgcgtccggttgaagggatggcggcgattcaacgtgcgattgacagtgtttctcattatctggtgctgaaaacagccatcagcatcatcaccggcctggtcgcctgggcgatgctcgccgcactcgatgttcgcttcgcttttgtctggggattgctggcctttgcgcttaattacatcccgaatattggtagtgtcctcgcggcaatcccccctatcgctcaggtactggtgtttaatggcttctacgaagcgttgctggtgctggcgggatatctgctgattaatctggtcttcggcaatattctggagccgcgtatcatggggcgtgggctggggctttccacattggtggtatttttgagcttgattttttggggatggttgttaggaccggtgggtatgctgctttccgtgccgttgacaattattgtcaaaattgcgcttgaacaaacagcgggaggtcaaagcatcgccgttctgttaagcgatctcaataaagagtgacggcctcagcagaggccgtcagggttacagagctttcaggattgcatccacgctggctttggcgtcaccaaacagcatgtgggtgttttccttgaagaacagcgggttttgcacaccagcatagccagtgttcatgctacgtttaaagacaatcacgttctgcgctttccacacttccagcacaggcataccagcaatcggactcttcggatcatcctgcgccgccgggttaaccgtatcgttagcaccaatcaccagtacggtatcggtatcagcaaagtcatcattgatctcgtccatttccagcacgatgtcatacggtacttttgcttcagccagcaatacgttcatatgtccaggcaaacgccccgcgaccgggtggataccgaaacgcacattaataccacgagcgcgcaatttctcagtaatttcagcgacaggatattgcgcctgcgcgactgccatgccgtaccccggagtaatgatcacactatgggagtttttcagcagttccgctgtctcttctgcggtgatttcgcggtgctcacccacttcctgatcatcgccagtagaagagccgtcggtgccgaaaccacccgcaataacgctgataaaggaacggttcatcgccttacacataatgtaagaaaggatagccccgctagaaccgaccagcgcaccggtcacaatcagcaggtcgttgctgagcataaagcccgcagccgcagccgcccagccggagtagctgttcagcatgctcaccaccactggcatatctgcaccaccgatggaggcgactaaatgccagccgaataccagcgcaattgcggtcattatcagcaatgccagcacttgcaggccgacgctgtccgtgcgaacaaatacaatcagcagcaggaaggaaacgaccagagccgccaggttcattttgtgacggtttggcagcatcaatggtttagagctaatcttgccacacagtttgccgaacgccaccacgctacccgtgaacgttaccgccccgatgaagataccgaggaacacttccgtcaggtgaatattgaccagaatcggtgccattcccgcgtcatgatgcagatagctgttaaagccaaccagcactgccgccagacccacgaagctatgcaggatcgccaccagttctggcatttcggtcatttcaactttcttcgccagacggataccaattgccccaccaatgaccatcgccagcaagatccagccaacattacccgtatccggtccaaaaatggttgcgattaacgcaatcgccatcccggcgataccgaagttgttaccctggcgagacgtttcatgtttgctaagaccggccagactgaagataaacaggatcgcggcaacaatgtatgcagctgtaactaatcctccagacatatgttaccccttaatttttgcggaacattttcagcatgcgctgagtcacggtgaagccaccgaaaatattaatgctggctataagcaccgcgataaaactaaggaagctaacccagccgccctggccaatctgcaacagtgctccgacaacaataatcccactaatcgcgttggtgacgctcatcaacggtgtatgcagcgcgtggcttacattccacaccacgtaataaccgacaacgcaggccagcgcgaaaacggtgaagtgcccaaggaattctttcggcgcaacgcttgccatccagccaaaaagaatgattgccagcgccatcaacgcgtatttacgccacggactgcaggtacatttttcctcagttttcacttccggtgccgctttttgtgccgcctgcggctgagcacttacctgaatcggcggtgccggccaggtaatttcgcccgcacggatcacggtcacgccgcgaatcaccacatcatcaaaatcaacagtgatattgccgtctttctctttgcacaacagtttcagcagattaacgaggtttgtgccgtaaagctgactggattgcgtcggcagacggcccggaagatcggtataaccaatcactttgacaccattttccgtagtgaagatttcacccggcacggtgtattcacagttgccgccgttttgggctgccaggtcgacaatcacactgcccgccttcatggagtcaaccatttcacgggtaattagcttcggcgctggtttgcctggaataagcgcggtggtgacaatgatatcgacctcttttgcctgggcggcaaagagttccatttccgctttgatgaacgcgtcgctcatcactttggcatagccatcgccgctgccagcttcctctttaaaatccagctcgaggaattccgcgcccatactttgaacttgttctttcacttccgggcgggtgtcgaatgcacgcacaatcgcgccgagactgtttgctgcgccaatggcggccagacctgcaacacccgcaccaatcaccatcacttttgccggtggcactttcccggccgcagtaatttgcccggtaaagaagcgcccaaattcatgtgccgcttcaacaatggcgcgataaccggcgatgttcgccatgctgcttagtgcgtccaggctttgtgcgcgactgatacgcggcacagagtccatcgccatcacggtcacgttacgttccgcaagtttttgcattaattccggattctgcgcaggccagataaaactcaccagcgttgtcccaggattcagtaacgcaatttcatcatctaacggcgcattgaccttcagaatgatctcactctgccagacgctattcccttctacaatttcagcgcccgcttgcacaaacgctttatcgtcaaaacttgccagttgacccgcgccgctctctaccgcgacggtaaaacccagtttcagcagctgttccactgtttttggcgttgctgcaacacgggtttcattggttaaccgttctcttggtatgccaattcgcatgatattcccttccatcggttttattgatgatggtttgcctgtgtcaggagccacacaagctgctcatgtacgagctaaatgttactccgttaaaataaattagtaacaaacgccctataacgtactgaaaattatgcctgtgatctagcgccaaaaatcagtatttcggcgtgaactcgcaaaatattaacgattcagccgtgatagtgggataaacaccttagaacgccggataaagactgataattgtcttcgacggtcgggtaaaacgagacatcgccccggcacgaatcactacttaacattaaattaacttatacaattcagttgcttcagtagtaatgatgctgatacggctgttttttaagcatagacggtcatttgagcaggattaaaattggcttaaggaatgtgatatgaaaaatgacgcagacagttacaccgtttaaatgcaataatcagccacgtttctcgttaataacaataccagtacctggtttgcgcaaggcgaaggattatttttatgaagcttaagaacaccctcctggcgagcgcactgctttctgctatggcattctccgttaacgcagcaacagaactgacaccggagcaagcggcagcggttaaaccttttgaccgtatagtggttaccggtcgttttaatgctattggcgaagcggtgaaagccgtttctcgtcgcgcagataaagaaggtgccgcctctttttatgttgtcgacacttctgattttggtaacagcggtaactggcgtgtggtcgctgacctctataaagccgatgctgaaaaagcagaagaaacaagtaatcgcgtaattaacggtgttgtcgaactgccgaaagatcaggctgttctgattgaaccgtttgacacggtcaccgtccagggcttctatcgtagccagccagaagtcaatgatgccatcaccaaagcggcaaaagcgaaaggtgcctactctttctacatcgttcgtcaaatcgatgccaaccagggcggcaaccagcgtattactgcattcatctataaaaaagatgctaagaaacgtatcgtccagagcccggatgtgatcccggcagattccgaagcaggacgtgcagctctggctgccggtggcgaagccgcgaagaaagttgagatcccgggtgttgcgactaccgcaagtccaagttctgaagtcggtcgcttctttgaaacccagagtagtaaaggcgggcgttacaccgtcacgctcccggatggcactaaagtcgaagaactgaacaaagcgaccgcagcgatgatggtcccgttcgacagcatcaaattctctggcaactacggcaacatgaccgaagtctcctatcaggttgcgaaacgtgccgcgaagaaaggtgctaagtattaccacatcacccgccagtggcaggaacgtggtaataacctgaccgtcagcgcagatctgtataaataactattcagttactcctataaggcggcttgatgccgcctttcgcatttttagtcacaaatttccccgcgaccattgcatgcagacacatctcttcgtaaaatcccgcgcttcagtggcaaactccatttttatgcgttttgccctaatatttattcttcttatcacgttttaatcactggatatcgatggaaaagaaactgggactgagcgcactcaccgcgctggtattaagcagtatgctgggcgcgggtgttttcagtctgccgcaaaatatggcggcagttgccagcccggcagcactgctcatcggctggggtattactggcgctggcattttattgctggcctttgccatgctgatcctcacgcgcattcgtcccgaacttgacggcggtatctttacctatgcccgcgaagggtttggcgagctaatcggcttttgttccgcatggggatactggctgtgcgcagtcatcgccaacgtctcctatctggtgatcgttttttccgcgttaagcttttttacggacacgccggaattgcgcctgtttggcgatggtaatacctggcaaagcatagtcggtgcaagcgctttattgtggattgttcactttttgatcctgcgcggggtgcaaaccgctgccagcattaacctggtggcgacactggcaaaattgttgccgctgggtctgtttgttgtgctggcgatgatgatgttcaaactggataccttcaagctcgacttcaccggacttgcacttggcgtacccgtttgggaacaggtgaaaaacaccatgctgatcaccctgtgggttttcattggtgtggaaggtgccgtggttgtttctgcgcgtgcgcgtaataaacgtgatgttggcaaagcgacactgctggcggttctctccgctctgggcgtttacttgctggtaacgctgcttagcctgggtgtggtggcacgtcctgaactggctgaaattcgtaacccgagtatggccggtctgatggtggaaatgatgggaccatggggcgaaatcatcatcgctgccggtttgatcgtttccgtttgcggcgcgtacttaagctggaccatcatggcagcagaagtaccgttcctggccgccactcataaagcattcccgcgcatttttgcgcgccagaacgcacaagctgcgccatccgccagtctgtggttgaccaacatctgcgtgcaaatttgtctggtactcatctggctgaccggttccgattacaacacgttgctgaccatcgccagtgaaatgattctggtgccctatttcctggtcggcgcgttcttgctgaaaatcgcaacccgtccactgcataaagcggtaggtgtcggtgcctgcatttatggcttatggttattgtacgcctctggtccaatgcacttgctgttatccgttgttctgtatgcaccggggctgctggttttcctgtacgcgcgcaaaacgcatacccatgataatgtactgaaccgtcaggaaatggtgctgattggcatgctgttaattgccagtgttccggcgacctggatgctggtgggataacgttcatcccatcgttggatagcaaaggagataacgatgggtaaaacccagcccttgccaatattaattactggcggaggtcgtcgcatcggcctcgccctcgcatggcatttcattaatcaaaagcaaccggtgattgtcagctatcggacacactatccagccattgatggactgattaatgcaggtgcgcagtgtattcaggctgattttagcaccaacgacggtgtgatggcgtttgccgatgaagtactaaaaagcacccatggtctgcgtgctattttgcataacgccagtgcgtggatggcggaaaaaccgggtgcgccactggccgacgtactggcttgcatgatgcagatccacgttaataccccatacctgctcaaccatgcgctggaaagattactgcgtgggcacggacacgccgccagcgatatcattcactttaccgattatgtggtggagcgcggtagcgacaaacatattgcgtatgctgcaagcaaagcggcactggataatatgacccgcagctttgcccgcaagctggcaccggaagtgaaagtgaattctattgcgccaagcctgatcctgtttaatgaacatgatgatgccgaatatcgacaacaggcgctgaataaaagtctgatgaaaaccgcgcctggcgagaaagaagtgatcgacctggtcgattacttacttaccagttgctttgtcaccggacgcagtttcccacttgatggcggtcgtcatctgcgttaatgcagctttatccagcatataatcaacacccatgcgcttatcccccaacacgcaacagaaccaacaaaagcggcgggcaagcgcatcattccggtgaaataccacaggctcaccaggtaaacaaaatagggaataatgctccacatactaaaaatgatggttgcgcgtaaggcttcaatgccgcgttcgctggcaacaatataatgcgcgataagcgcaaaggtcgggaaaagtggaatcagcccggcgatataataatttttcgtttttgctaaaacaccaatcaacagcactaccagcgcaccgagcgcggctttgattaccagccccatctttttaccttaacacttccataacaagtcatcagtagaatacctgatgaaaacttgtttagaaacgattgatagtaagtaaaaacagcgcggtgtattgtgacgtttttatatctaccgtgaatgttatgaacactatcgtatttgtggaagatgatgcggaagtcggtagtctgattgccgcgtacctggcaaaacatgatatgcaggttaccgtagagccgcgcggcgaccaggccgaagaaaccattttgcgagaaaatccggatttggtgttactcgacatcatgctaccaggcaaggacggcatgaccatttgtcgtgatttacgcgcaaagtggtctggaccgattgttcttctaacctctctcgatagcgatatgaaccacatcctggcactggaaatgggtgcctgcgactatattctcaaaacgacgccccctgctgttttgctagcgcgtttacgtttgcatttgcgtcagaatgagcaagccacactgaccaaaggtcttcaggaaacgtctctgactccctacaaagccctgcatttcggcacgttgaccatcgatcccatcaaccgcgtagtcaccctggctaacactgaaatcagcctcagcacagctgatttcgaattattgtgggaattagctacccatgccgggcaaatcatggaccgcgatgcattgctgaaaaatttacgcggcgtcagttatgacggactggatcgtagcgtggacgtggctattagccggttaagaaaaaaactgctcgataacgccgcagaaccttatcgcattaaaactgtgcgtaacaaaggctatctttttgcgcctcatgcatgggaataagcgatgaaaaaactgtttatccagttttacctgttattgtttgtctgcttccttgtgatgtctctgctggttgggctggtgtacaaatttaccgccgaacgcgcgggcaaacagagcctggatgatttgatgaacagtagcctgtatctgatgcgcagcgaattgcgtgagatccccccacacgactggggtaaaactctgaaagagatggatttaaatctctctttcgatctgcgtgtcgagccactgagtaaataccatcttgatgatatttccatgcaccgactgcgtggcggcgaaattgtcgccctggacgatcagtacacgtttttgcagcgtatcccgcgcagccactacgtgctggcagttggtcctgttccttatctttattatctccatcagatgcgattgctggatatcgccctgatcgcttttattgctatttccctcgcctttccggtgtttatctggatgcgtccgcactggcaggatatgttaaaactggaagcagcggcgcaacgatttggcgatgggcatctcaatgaacgtatccactttgatgagggtagcagctttgaacgacttggcgtcgcatttaaccagatggcggacaatatcaacgccttaattgccagcaaaaaacagcttattgacggtatcgctcacgaactgcgaacaccgttagtgcgcctgcgttatcgactggagatgagcgataacctgagcgccgccgaatcccaggcgttgaatcgtgatatcagtcaacttgaagctttaattgaagagctgctgacttatgcccgactcgatcgcccacaaaacgagcttcatcttagcgaaccagacctgccgttgtggctgagtacgcatctggcagatattcaggcagtaacgcccgataaaacggtacggataaaaacgctcgtgcaaggccattatgcggcgttggatatgcgcttaatggagcgcgtgctggataatttgctcaataacgccctgcggtactgccatagtacggttgaaaccagcctgctactgagcgggaatagagcgacattaattgttgaggatgatggcccagggattgccccagaaaaccgcgaacatatctttgaaccttttgttcgcctcgatcccagccgggatcgcagtaccggcggctgcgggctggggctggcaattgtccactctatagcactggcaatgggcggtacggttaattgtgacaccagcgaactgggtggtgcccgcttcagctttagctggccgttatggcataacatcccgcaatttacctctgcctgacactacgcgcacgatggtcaagtcaccacgactgtgctataaaataagtatgttgtaactaaagtggttaatattatggcgcgttacgatctcgtagaccgactcaacactacctttcgccagatggaacaagagctggccatatttgccgctcatcttgagcaacacaagctattggttgcccgcgtgttctctttgccggaggtaaaaaaagaggatgagcataatccgcttaatcgtattgaggtaaaacaacatctcggcaacgacgcgcagagcctggcgttgcgtcatttccgccatttatttattcaacaacagtccgaaaatcgcagcagcaaggccgctgtccgtctgcctggcgtgttgtgttaccaggtcgataaccttagccaagcagcgttggtcagtcatattcagcacatcaataaactcaagaccacgttcgagcatatcgtcacggttgaaagtgaactccccaccgcggcacgttttgaatgggtgcatcgtcatttgccggggctgatcacccttaatgcttaccgcacgctcaccgttctgcacgaccccgccactttacgctttggttgggctaataaacatatcattaagaatttacatcgtgatgaagtcctggcacagctggaaaaaagcctgaaaagtccacgcagtgtcgcaccgtggacgcgcgaggagtggcaaagaaaactggagcgagagtatcaggatatcgctgccctgccacagaacgcgaagttaaaaatcaaacgtccggtgaaggtgcagccgattgcccgcgtctggtacaaaggagatcaaaaacaagtccaacacgcctgccctacaccactgattgcactgattaatcgggataatggcgcgggcgtgccggacgttggtgagttgttaaattacgatgccgacaatgtgcagcaccgttataaacctcaggcgcagccgcttcgtttgatcattccacggctgcacctgtatgttgcagattaacgcccggctttcatactgccgaccatctgttctggccgtacccagctgtcaaactcggcttcgctaagataccccagcgcaagggccgcagcttttaaggtcagcccttctttatgcgcttttttggcgatctcggcggctttgtcataaccaatgtgggtgttaagcgcagtcaccagcatcaggctttcattgagtaattgattgattcgctcacgattcggttcaatacccactgcgcagtgtttgttaaaactttccatgccatctgccagcaagcgcacgctttgcaggaaattgtggatcaccattggacggaagacgttcagttcaaagttaccggaagcgccccccatgttgatcgccacgtcgttccccatcacctgacagcagagcatggttaatgcctcacactgtgttgggttcactttccccggcatgatactgctgcccggctcattttccgggatactgatttcaccaattccgcagcgcgggccagaggccagccagcggacatcattggcgattttcatcagactcgcagccaaccctttcaacgcgccgtgcgcctgaaccagggcatcacaggtcgccagcgcttcaaatttgttcggcgcggtaacaaacggtgcacaggtaatgactgccagttcatctgctacgcgacgcgcatactccggatgggtatttagtccagtacccaccgctgtaccgccaagagccagttccgctacgtgaggcaggctgtattcgatatgtttgagattatgctcgagcatcgctacccagccggaaatctcctgccccagcgttaacggcgtggcatcctgcaagtgagtacgaccaattttgacgatatcggcaaaagcacgggatttctcattcagtgtctgtgtcagggttttaagctgaggaatgagttgcttgcgcagcgccagcagcgccgcaacgtgcatcgccgtcggaaagacatcgttggaactttggcttttgttcacgtcgtcgttagggtgaactttacgttccatcccgcgcacaccgccgagtaattcactggcccggttagccagcacttcgttcatgttcatgttactttgcgtgccggagccggtctgccagatagccagcgggaattcgtcgtcatgctgtcctgccagtacttcatccgccgcctgacgaatggcgctcgctttctcttcagacaacaagcctaaatcttcattaacttttgccgctgcacgcttggttagcgccagcgcatgaatcagactggtgggcattttctccgtgctaatgcggaaatgctccaggctgcgttgagtttgtgcgccccacagcttatctgccgggacatcaatcgcccccatgctatctttttcgctgcgtactgtattcatgacctgctcctcacctgattaattttttctttctgttttgctttcgttaagcaacttttagctcacttattatttaccatttgataacaaatgtttggtctttcgtgccatgtaaaaaaaccgccccgaagggcggctctgtttatttcacacagcgggtgcattgtgtgagttgtatctgctggaagaagtcatttcctttatcatccacaaggataaacgccgggaaatcttccacttcaattttccagatggcttccattcccagttccggatattcaacacattccaggctcttaatacttccctgcgccaatacagcggccggaccaccgatactgccaaggtagaagccgccgtgttttttacaggcatccgtcacctgctggctgcggttgcctttcgccagcatgatcatacttccgccctgcgcttgcagttgatcgacataagaatccatccgtccggcggtcgttgggccaagagaaccggaggcataaccttccggcgttttggccggacccgcgtagtaaatcggatgatctttgatgtactgcggcagcccttcaccgttatccatccgctctttcagtttggcgtgagcaatatcacgaccgacgataatcgtgccgttaaggcttaagcgtgtagaaacgggatactggctcaactgtgcgaggatctctttcatcggacggttaaggtcaacgcgcaccgcttcgccttctcccgctttgcgcagctcttccgggatatatttgcctggattatgttccagtttttcgatccagatcccctgacggttgatcttcgctttgatattacggtcagcagagcaggagacgcccataccgaccgggcaggatgcgccgtgacgtggcaggcgaatcacgcggatgtcgtgagcgaagtatttaccaccaaactgcgcacccagaccaagattttgcgcttcgatcagcaattctttttccagttccacatcgcggaacgcctgaccgtgctcattcccttccgttggcagttcatcatagtatttcgcggaagccagtttcaccgttttaaggttcgtttctgcagaagttccaccaataacgaacgcaatatgatacggaggacaggccgccgtacccagcgtgcgcatcttctcaaccaggtaatttttcagtttccccggcgtcagtaacgctttggtttcctgatagagatacgtcttgtttgcgctaccaccacctttggcgatacagaggaatttgtattcgtcgccatcaacggcataaagatcgatctgcgctggcagattggtgccggtattcacttctttatacatatccagcggcgcgttttggctgtagcgcagattatcttcgatataagtgttatagacaccgcgcgccagcgccgcttcatcaccaccaccggtccatacacgctgcccttttttaccaacaataatcgcggtgccggtatcctgacaggttggcagaacgcctttcgccgcgatgtcggagttacgcaggaattgcagcgccacatatttatcattttcgctggcctccgggtcacgcagaatgtcggccacctgttgttggtgcgccggacgcagcatgaagctcgcatcatgaaacgcctggcgcgccaacagagttaacgcttcgggtgcgactttcaaaatctcctgcccttcaaattcagatacgctaacgtgttcgctggttagcaggtaatactcagtatcatcttttttgagtggaaaaggagcctgataatgaaagggtttgttactcattgttctctcacttactgcctggtttggttatgctctgggcgggtgttccgttgccctgttaaaagcgagtaacaatatcctacacacttttttaacaaaaactgagactagtacgactttttgcggctccaggttacttcccgtaggattcttgctttaatagtgggattaatttccacattaaaacagggattgatcatgcaaaaactcattaacagtgtgcaaaactatgcctggggcagcaaaacggcgttgactgaactttatggtatggaaaatccgtccagccagccgatggccgagctgtggatgggcgcacatccgaaaagcagtagtcgagtgcagaatgccgccggagatatcgttagtctgcgtgatgtgattgagagtgataaaagcactctgctcggagaggccgttgccaaacgctttggcgaactgcctttcctgttcaaagtattatgcgcagcacagccactctccattcaggttcatccaaacaaacacaattctgaaatcggttttgccaaagaaaatgccgcaggtatcccgatggatgccgccgagcgtaactataaagatcctaaccacaagccggagctggtttttgcgctgacgcctttccttgcgatgaacgcgtttcgtgaattttccgagattgtctccctactccagccggtcgcaggtgcacatccggcgattgctcactttttacaacagcctgatgccgaacgtttaagcgaactgttcgccagcctgttgaatatgcagggtgaagaaaaatcccgcgcgctggcgattttaaaaagcgccctcgatagccagcagggtgaaccgtggcaaacgattcgtttaatttctgaattttacccggaagacagcggtctgttctccccgctattgctgaatgtggtgaaattgaaccctggcgaagcgatgttcctgttcgctgaaacaccgcacgcttacctgcaaggcgtggcgctggaagtgatggcaaactccgataacgtgctgcgtgcgggtctgacgcctaaatacattgatattccggaactggttgccaatgtgaaattcgaagccaaaccggctaaccagttgttgacccagccggtgaaacaaggtgcagaactggacttcccgattccagtggatgattttgccttcagcctgcatgaccttagtgataaagaaaccaccattagccagcagagtgccgccattttgttctgcgtcgaaggcgatgcaacgttgtggaaaggttctcagcagttacagcttaaaccgggtgaaagtgcgtttattgccgccaacgaaagtccggtgactgtcaaaggccacggccgtttagcgcgtgtttacaacaagctgtaagagcttactgaaaaaattaacatctcttgctaagcttattaaaggcttataacaccttcaggcggccagtccgcctgatttcattttatggataatcattatgaataaaagcctggtagcggtaggcgtcattgttgcgctaggcgtagtctggacaggcggcgcatggtatacaggcaagaagattgaaacccatctcgaagacatggtcgcgcaggcgaacgcgcaactcaaactgacagctcctgaatccaacctggaagtgagttatcaaaactatcatcgcggcgtattcagcagccagttgcaactgttggtgaaacccattgccgggaaagaaaatccgtggattaaaagcggtcagagcgtcatcttcaacgaaagcgttgatcatggtcccttcccgcttgcccagcttaaaaaactgaacctgatcccgagcatggcaagtattcaaaccacgctggttaataacgaagtaagcaaaccactgtttgatatggcaaaaggtgaaacgccttttgagattaacagccgcattggttacagcggtgattccagttccgatattagcctcaagccactgaattacgagcaaaaggatgaaaaagtcgcctttagcggcggcgagttccagttaaatgctgacagagacggcaaagccatctccctttccggggaggcgcaaagtggtcggatagacgcagttaacgaatacaaccagaaagtgcagttgacctttaataatctgaaaaccgacggttccagcacgctggcaagttttggtgagcgtgtaggaaatcaaaaactgagtctggaaaaaatgaccattagtgtggaaggcaaagaactggcactgctggaaggcatggagatcagcggtaaaagcgatctggtcaatgacggtaaaacgatcaatagccaactggattacagcctaaacagcctgaaggtacagaatcaggatctgggcagcggcaagctgactttaaaagtcggccagattgatggtgaagcctggcatcagtttagccagcaatataacgcgcaaactcaggcgctgctggcacagccagaaattgccaacaaccccgaactttatcaggagaaagtgacggaagccttctttagcgccctgccgctgatgctgaaaggcgatccggtgattactatcgcgccgctaagctggaaaaacagtcagggtgaaagtgccctgaatctgagcctgttcctgaaagatccggcaacgactaaagaagcgccgcaaacgctggcgcaggaagtagatcgtagcgttaaatctctggatgcgaaactgaccattccggtggatatggcaactgagtttatgactcaggtagcgaagctggaaggttatcaggaagatcaagcgaaaaaactggcgaaacagcaagttgaaggtgcaagtgcaatggggcagatgttccgtctgaccaccttgcaggacaataccatcaccaccagcctgcaatatgctaacggtcagataacgttaaatgggcagaaaatgagcttagaagattttgttggcatgtttgcgatgccagctcttaacgttccggctgtaccggcaattccgcagcagtaattcacggccaaaacgccggagaattttcactccggcgttttcatctgaaaacaaaccagagattgcctgatgcgctacgcttatcaggcctaccttttcctgcaacactttgaatttatgagtttttgtaggctggataaggcgtttacgccgcatccggcataaaaaacgcgcactttgtcaacaatctgaaacgccggagatttttctctccggcgttattttttacttcagcataaagtcatactgaatactcattttcacatcccagtaattcaggcgatcgcccagcgtactgccatcgcgcttttcccgccctttatcggcagcaagaaagaaattcatcccttgtaacggcccttcgctgacccgatagttcataccacctaagatacccgtgccttcaatccgcacatctcgtttactggattcatagccgcgagtcacaatcggtgcaaatgtcagcgtaaattgcggcgttaaacgatagttgacgcccaattgccaggactgcattccttcacggttacgatcaagacttaaactaaagggatagccaatgtcggtatccaccacggcaccattcattgcatggcgcaaataaccaccactgccaaatacacttccccacggcgcattccaggtcaattgtccactaaccaacgccgtttcattgggctggctggtattacgacttaaaccttcgagctgcgcgtaaaagccgagcaactcccctttcaacgtataattcgggtcgagcggtatgcttttctcgagaatactttgtatctgattggaaacatctttctgtacgcttgcccccagagaatagcgactggtatcatcatgccaactggcggctaaaaaagaacgtgcgcgatgtttatcgtattttcccgtctggctgttatacaccccttcatcacgaataccggttgtactatcagtccataaaaatactcgactacgccacattccccacagatcaatatttggtgttaaagcccaataacctaatgctccttcagaaactgtcggtaatgtacgttggctactgccagccattaacggaatacgataaggtaagctaccataactataatccgtcccgaagcgacctaatttaagcaggctattttcactgggttttatttttactgcccccagggcaaagccaaaacttttatcaccatcaagataccaccgggtactcatatcagcacgagcacctaatttataaacataatacgccccgccttcaacgccaataatattggaataataaccactattgaaatcgagcaatcctccctgtacccatgcgtaaatatctcttcccgcgccagcactgggcttatccgccctgcgcaattcgtttttcagtctgatgcgtagtcccgcttcatcgtcagccagttgcgccgcataagcagaggtaaggccagaggcagccgtcaggcaaataacggccatggccactatttttctcatagttgcacctttgatgttctgattatttttattgaatattaattagtgatatcgctgattaattgctgctgcacttttttacgattatcaatttcaaccacgatttctttgaattttttatccgtgagcggataaaaccagataataacgaatgccagtagcataaatccgcaaggtactaaggcaatacttgtgcggatgcccataataacttccggcgtttgcacctgattggcgatatatccgcttaaccccaaaataaaggcaggaatactacctccgattgcctgaccgcatttacgggtaaaactgaatagactataggtgagcccttcaattcgcacgccggtcaggtattcaccgtattctacggtatcagcttccagcgcccacatcacggtcatggtaacgccctgaccaatactagcgatggccaacgcaaccaacgccaccggcagactccagacggaaacccagaagaacagcagataaccgcaggttcccagcaaagcgccaatcaggaaggtattctttttaccgatcctcgcgaccatccccggcaccagcggtgcgcttgccacagtaccaaccaggttttgcaccagtaccagcacagtgaacagcccggtatcatttaacacatagcgcacgtagaacaagctgctggcgctgaccgcaaaggtgctaatcagcacacacagcgcaccgatgcacaacataaacagcgggcgattccgtttcagggtttgcagactgatattcaaactcggctgcgcaacgatacgtaccacattctcacgcgtgcttttgaagcagatgaagtaaagcaccattccggcaatcgccagcacaattgtccagaaatggtatacgctcaccatctcttccgggctggagttcttaatgctcggtcctatcagaaatgccaggcagacaaaggtcaaactagcggcaatcccacgagccgcgcccagacgggcgcgggattgtggttgttgggtcatcgcggtagcaagactaccataaggaatattcaccaggctgtagcaaagcccgaggcccatgtaggtcaaatatgcatacaccactttgctaccatggctccagtcggtcagcacccagaataccagcacgctgaagatcattaacggcgcagtaccgaagagtaaaaacgggcggaattttccccagcgggtattcacactgtccaccactcgtccggcaaagacgtcggcgaaggcatcgaatacccgcaccagtaacagcatggtgcccgccgcagcggcaccgacgccagcgacgtcggtgtagtaactcaacaggaagagcgcccccattgcgaaggcgaagttattggcgacgtcaccgaggctgtagccgacgatggtgcgccaggagagttgttgattcattgtttgcctccctgctgcggtttttcaccgaagttcatgccagtccagcgtttttgcagcagaaaagccgcgctcttcggtttgcggtcgcgagtgaagatccctttcttgttaccgccaacgcgcaatatgccttggctggtcgcaaaatcggcgaaattccatacctgttcaccgacgacggcgctgacgcgatcaaagacgcggtgatacatatccagccatgcacactgatactcttcactccacatgtcggtgtacatactgtgcagcccggctaacgtatccacgccgtattcggtgatgataatcggctgatgcagtttctcctgccaggccagaagttctttttccagtaccttctctgccgtttccaaatcgccgctttggacataccatccgtaataacggttcaggcacagcacatcaaagagatcgctgatggtatcggtgtgagcgtcgcagaacattacattgacgcaggtgatcggacgcgtcgggtcgagtttacgcgttgcttccgccagtggcgcgaaatattcccgtgcaccttgcggacgggtatccggttcgttggcaatactccacatcaccacgcttgggtggtttttgtcacgcgctatcagctctttaatcgcctgtaagtgcgcttgctgagtttccccgttgactgcctcttcgctgtacagttctttcggcttgttgcccgcttcgaaaccaatgcctaaagagaggttaaagccgacagcagcagtttcatcaatcaccacgatgccatgttcatctgcccagtcgagcatctcttcagcgtaagggtaatggctggtacggtaggagttggccccaatccagtccattaatgcgtggtcgtgcaccatcagcacgttatcgaatcctttgccacgcaagtccgcatcttcatgacgaccaaagccagtaaagtagaacggtttgtggttaatcaggaactgttcgcccttcactgccacactccggatgccgacgcgaagcgggtagatatcacactctgtctggcttttggctgtgacgcacagttcatagagataaccttcacccggttgccagaggtgcggattcaccacttgcaaagtcccgctagtgccttgtccagttgcaaccacctgttgatccgcatcacgcagttcaacgctgacatcaccattggccaccacctgccagtcaacagacgcgtggttacagtcttgcgcgacatgcgtcaccacggtgatatcgtccacccaggtgttcggcgtggtgtagagcattacgctgcgatggatcccggcatagttaaagaaatcatggaagtaagactgctttttcttgccgttttcgtcggtaatcaccattcccggcgggatagtctgccagttcagttcgttgttcacacaaacggtgatacgtacacttttcccggcaataacatacggcgtgacatcggcttcaaatggcgtatagccgccctgatgctccatcacttcctgattattgacccacactttgccgtaatgagtgaccgcatcgaaacgcagcacgatacgctggcctgcccaacctttcggtataaagacttcgcgctgataccagacgttgcccgcataattacgaatatctgcatcggcgaactgatcgttaaaactgcctggcacagcaattgcccggctttcttgtaacgcgctttcccaccaacgctgatcaattccacagttttcgcgatccagactgaatgcccacaggccgtcgagttttttgatttcacgggttggggtttctacaggacgtaacataagggactcctcattaagataataatactggtcaacctttaatctgattagttaaccaattctgtgttgcacacagttatctgtgagaaacccatggaagagaaatggaaataaaaagaactgacaccgcgatcaaaaaaccaaaaactgcaatacccacagcgtgatatagatcgcattaatctttaaaacagcgttgacagaagccataaaataagcaaccgaacgttcgttcgagcgtattgggaacgataaactctcatgacatatggctacagtgaatattttggggggaattctccgaagccgggaaggataatttttgcacagagaaattacgatatgaaacgcgggcacagttatcaccagcccgccgaaaaagagagagaatcaggatgcggttaagataccgccaatcatcgcgcgtaatccctgagcaaagctcgcttcacgcgccaggtcttccgcttcgatatcggccagtacaccgtaggtcagatccagcagtaaacgactagtcattgccgtgttgatgtctgggcttatctcgcctttttgctgggcatcacgcatccgctgggcaacaaattccgtgatcgtcatatgcttatttttaagcatggcggcgacctgtgggttacgcatcccttccgccataatttcaaccaccagcgcccgttgtccaaaggcttcatgggtgagagagacaatggactcgaccatatagtcaacgaaatgaatcccttcaatcggttcccggaaacgggccagcgccctctcctggtcctgtaagataatcgcctgaatcaaggcttctttggagatgaaatggtgatagagcgtcccgggactaatggcgcaagatttacagatggctttcatgctggcactgtgaaatccattttcactaaaaatctctctggcagcattgaggatccgggtccgtgtcggttgtgcttcagtctgcatgttatccatcattaaaccattatagttagcgtgaataactagtttaccgcgttgtcaggtgagcgcctatcattgctgttgaatagtgcgaaggcacactctattcgtatacttttcactctgaaattggttaaccaatagccgtgatttggctgccagttatttagcagagacgttgatgagtttatcccggtaaacaacacgcacggttgtttaccggtccgttagtgtattaattgagctcctgtaccccaccaccggagacggtgagaatttgtccgcttacccagctcgcagcagggctgcaaaggaacagcgctgcgttagcaatatcttgcggttggcccagacgtctgatcggcgtgtgctgtaacattttttgttcaatttctggtgtaataacggatttcagggcatcggttaatattgcccccggcgcaatgccatttacccgaatatttttttcacccaggtcaaacgccatatttctgaccagatgactggccgcagctttagaacttgcataggaagtcatgtttatatttttattttctgccgccatagaagtgatggtcagaataacgccaccgccatttttttccatttctggcgcaacaagttgactcagatggaaaaaagaaaacacattcagttcataagcacggcgaaaatccgccattggcatatcaaacggtttaggtccaccgccaccggcgttgttaaccagaatatcaactttacccagcttactgatagcaaagtctgccagtgcagagagttcctgttcggaagtaatatcacaacggcaggcaaatgcctgaccacccagttgttgaatttcgtctacaacatggttagctgcgtcggcgttaatatcactgaccaccacagatgcgccagctgtcgcgaatgtaatggcgatttctttaccaatacctgcacccgcacctgtgatgatggcgcattttccgtcgagtctcaggttgtcagaattaaacacataaacctcctgtgaacttcagtaaaaataaaaggcaccgcctgtgtgccacattttttatcattaaccttgaggaaaggacactaccaggtatagcagataaagagaggattatttcgctgcaatgagccgggcgggaataataagattgcgactatgcgtctcttcatgggtgattttttgcatcatgcgatccgcaagtgtgataccaagttcccgcgctggcgtgctggcccaggtaacaggtatatcatcaagtgtggttggtgtcgcatcggtaaatgccgccaggctaacctgttgctcaaagtaacgatcgactccgctttccccgctttgccgccctgctttgagcaaaccaaaccatgcccccatcgcaatagtttcgttatagcaaaccacggcactgatggtcgggttatgacgtaaaagcgccgtgatagcttccgcggcttgcttctggctggaagtgcactccaacacccaatcgctatgaaacggcaggccaaattttagtagagttgcacaatagcccccaacccgttctgcacgggttaaactggaactttgccctcccagccaggcgatccgctgatgcccattgcgaatgagatgctccgtcaacaactgtgcagcctgcatgttgtccgggcgaaccgtatcaacatcatcaagataactggcacgggaagcgaaaatcaccgggatagctttttcttctgccatccgtcgcaggtcatcgctacttcctgcagctccggcaattaccacaccatcgacaccctgattcagtaacagactaaaccgctgtgccagctgctcaccgtctttaccgccgtgaagcaaaaaaaccatccgtccctgcgcttccagagcttccgtcaatccggccgtcaattcggcgtaaaacggcgcagataaatcacggacgatcaaaccaatgacgccgctttgcccgccgcgcagcgcgctcgcctggcgattgcgcacaaatcccagctcttcaatggcggcgttaacgcgttctcctgtggcggtagagattcgccctttgccactaagcaccaggctaacggtacttacgctcacgcccgcagccagcgcaacatcatgaatggttatttttttggcggtagccatgcagatgacctactccctgattatgtgacagataaaacgttttaccttttatttatcttatacccgctattatcgttgcgtaatgtgatttatgcctcactaaaatttgataaaacgttttatcttctcgcgcaatttactgaatccagattgttctctacgaggagtcgttttatgacggcgaaaacagcaccgaaagtcacgctgtgggagttcttccagcagttaggcaaaaccttcatgttacccgtggcattattgagcttctgcggcattatgctcggcattggtagttctcttagcagccatgatgtcataaccctgatcccggtcctgggcaaccccgtgttgcaggctatctttacctggatgagtaagattggcagctttgcttttagtttcctgcctgtcatgttctgtatcgccatcccgctgggcctggcacgcgaaaataaaggcgtagcggcattcgctggcttcatcggttatgcggtaatgaacctcgcggtaaacttctggttgaccaataaaggcattctgccaaccacggatgccgcggttctgaaagccaataacatccagagcattcttgggatccagagcatcgataccgggatcctcggtgcggtgatcgccggtattatcgtctggatgctgcatgagcgtttccataatatccgcctgccggatgcgctggcattcttcggcggtacgcgcttcgtaccaattatctccagcctggtgatgggccttgtcggcctggtgattccattagtctggccgattttcgccatgggtattagcggcttgggccatatgataaacagcgcgggtgatttcggaccgatgctgtttggtaccggtgaacgtctgctgttgccgtttggtctgcatcacattctggtggcattaattcgctttaccgacgcaggcggcacgcaggaagtctgcggtcaaaccgtcagcggcgcactgaccatcttccaggcgcaattgagttgcccgaccactcacggtttttctgaaagcgccacgcgtttccttagccaaggtaaaatgcctgcgtttctcggcggtctgccaggtgcagcgttagctatgtatcactgcgcgcgcccggaaaatcgccataaaattaaaggtctgctgatttctggcctgatcgcctgcgtcgttggcggcactaccgaaccgctggaattcctgttcctgttcgtagcgccagttctgtatgtcatccacgcgctgttaaccggcctcggcttcaccgtcatgtctgtgctcggcgtcaccatcggtaataccgacggcaatatcatcgacttcgtggtgttcggtattttgcatggtctgagtaccaagtggtacatggtgccagtggtggcggcaatctggtttgtcgtttactacgtcatcttccgtttcgctatcacccgcttcaatctgaaaaccccggggcgcgatagcgaagttgccagcagtatcgaaaaagccgttgccggtgcgccgggtaaaagtggttacaacgttcctgcaatcctcgaagcattaggcggtgccgacaatattgtcagcctcgataactgcattacccgtctgcgtttgtctgtgaaagatatgagccttgttaatgtgcaggcactgaaggacaatcgggcaattggcgtagtacaacttaatcaacataacctgcaggttgttatcgggccacaagttcagagtgtaaaagatgaaatggccggtctgatgcatactgtccaggcataaggataagatatgttcgattttagtaaggtcgtggatcgtcatggcacatggtgtacacagtgggattatgtcgctgaccgtttcggcactgctgacctgttaccgttcacgattagtgacatggattttgccactgccccctgcattatcgaggcgctgaatcagcgcctgatgcacggcgtatttggctacagccgctggaaaaacgatgagtttctcgcggctattgcccactggttttccacccagcattacaccgccatcgattctcagacggtggtgtatggcccttctgtcatctatatggttagtaaactgattcgtcagtggtctgaaacaggtgaaggcgtggtgatccacacacccgcctatgacgcattttacaaggccattgaaggtaaccagcgcacagtaatgcccgttgctttagagaagcaggctgatggttggttttgcgatatgggcaagttggaagccgtgttggcgaaaccagaatgtaaaattatgctcctgtgtagcccacagaatcctaccgggaaagtgtggacgtgcgatgagctggagatcatggctgacctgtgcgagcgtcatggtgtgcgggttatttccgatgaaatccatatggatatggtttggggcgagcagccgcatattccctggagtaatgtggctcgcggagactgggcgttgctaacgagcggcagcaaaagtttcaatattcccgccctgaccggtgcttacgggattatagaaaatagcagtagccgcgatgcctatttaagcgcactgaaaggccgtgatgggctttcttcccctagcgtactggcgttaactgcccatatcgccgcctatcagcaaggcgcgccgtggctggatgccttacgcatctatctgaaagataacctgacgtatatcgcagataaaatgaacgccgcgtttcctgaactcaactggcagatcccacaatccacttatctggcatggcttgatttacgtccgttgaatattgacgacaacgcgttgcaaaaagcacttatcgaacaagaaaaagtcgcgatcatgccggggtatacctacggtgaagaaggtcgtggttttgtccgtctcaatgccggctgcccacgtagcaaactggaaaaaggtgtggctggattaattaacgccatccgcgctgttcgttaaccccaattgcgcaacgtaaaaaatcgttgcgcaatcgtggatttttaccctgctttgtttttataatggtgcgcacttttatatccagaaaaagagtgcgaccatgattgataccaccctgccattaactgatatccatcgccaccttgatggcaacattcgtccccagaccattcttgaacttggccgccagtataatatcagccttcctgcacaatccctggaaacactgattccccacgttcaggtcattgccaacgaacccgatctggtgagctttctgaccaaacttgactggggcgttaaagttctcgcctctcttgatgcctgtcgccgcgtggcatttgaaaacattgaagatgcagcccgtcacggcctgcactatgtcgagctgcgttttagtccaggctacatggcaatggcacatcagctgcctgtagcgggtgttgtcgaagcggtgatcgatggcgtacgtgaaggttgccgcacctttggtgtgcaggcgaagcttatcggcattatgagccggaccttcggcgaagccgcctgtcagcaagagctggaggcctttttagcccaccgtgaccagattaccgcacttgatttagccggtgatgaacttggtttcccgggaagtctgttcctttctcacttcaaccgcgcgcgtgatgcgggctggcatattaccgtccatgcaggcgaagctgccgggccggaaagcatctggcaggcgattcgtgaactgggtgcggagcgtattggacatggcgtaaaagccattgaagatcgggcgctgatggattttctcgccgagcaacaaattggtattgaatcctgtctgacctccaatattcagaccagcaccgtagcagagctggctgcacatccgctgaaaacgttccttgagcatggcattcgtgccagcattaacactgacgatcccggcgtacagggagtggatatcattcacgaatataccgttgccgcgccagctgctgggttatcccgcgagcaaatccgccaggcacagattaatggtctggaaatggctttcctcagcgctgaggaaaaacgcgcactgcgagaaaaagtcgccgcgaagtaacaaaatggatggtgcaaatgcaccatccatttttcatgcaaggcacaaagtcgcgcgatgtttggcggattcgatgcccagctcaatcaactccattacctggattgcctggcttgccggaaccggattttcaccatcgccatttaacgcatcacgaatagccgcatagtaagccggataattcccaggcaccgtcaacagcgtttcttcgacacgttcctcaccttccacgcgggtaagtacgccatcacgcatatcgtagccccagtcttcctgcggtagacgctcgccatttttcagacgttcttcctgtggatcgaggccatatttcacataactgcctcgggatccatgcacgatataccgtgcactctcagcggctgccagcatggtaccgtgtaaaatgactcgccgctgtggataggacaagatggcgtggaaataatcggtgctctgcgctccgggccgtaactgtgccaaatctaccgtcatgctgaccggtaaaccaaaaagcgtaatggcctgatcaagaagatgtggtgctaaatcgtaccagataccgctgcctgggccgccctgttcacgccaacgatcgcgcacctgcggacggaagcggtcaaaatgagactcaaagtaagcaacttcacccagcacgccttccgcgagtaaaccttttagcgtcaagaaatcgctatcccagcgacggttatggaatacagacagcacacgccccaggctttttgccagcgcatccagctctcgcgcttgactcagtgtcacggtaaagggtttatcaacgaccacatgtttacccgcctcaagcgccgctttggctaacgggaaatgggtatcgttgggtgtaggaatgacaatcaggtctatgttgggatcgttaaacagatgcttcggctcagagacaaccgtaaccgttggccagtcggcttttacttttgtttcatcactgctggagattaccgccagttcctgcccgggcgtgcccgcaatcaggggcgcatggaaggttttgctcgcataaccatacccaatcaacccaacacggatgttgtcgctcatgtcattgcctctcattgaagtatgatggctatttgacactatcctttacccacgctcaacagtttaataacctgccagcaataagggatgttgtttaacttaagtcaaaaaaatagcgaattttccaacgacaaaagctaaatatcgcaaaaacctcagtaaaaatcttgctggagctattattgctaagtaacatttaccccctgaagttaatggatcaatcaagagagatgtgggctgtaatgaatcgtcttattgaattaacaggttggatcgttcttgtcgttagtgtcattcttcttggcgtggcgagtcacattgacaactatcagccacctgaacagagtgctagcgtacaacacaagtaagctctgcacttgtggagcgacatgctgcccgtccgggtgcatgttttcacttgtcggatattaaaccaggaatttattatcttgttcgatgttgttggtgattgtcagggatagtaaagcgcgttactcttttcagagcagtttttcatccctgaatatttgccatcagcgcattcttattattgtaataacacaagcgttcacttttggtgaaattttatcatcactaataatacctacccctttggtattaattattttatggaccttttatgactgttcaggactacttattaaaatttcgcaaaatcagtagtctcgaaagtctggaaaaactctacgaccatcttaattacaccctgacggacgatcaggaactgatcaatatgtatcgtgctgccgatcaccgtcgcgcagagctggtttctggcgggcgtttgtttgacctcggccaggtaccgaagtccgtctggcactatgtccaataaagaaagtagcgatcggttataaaagccttataataacgcccctaaaattagatttgcctgtttgcgtcgctattctggagaacctatgaccaccacaacgccacaacgtattggaggctggttgcttggcccgttggcctggcttttagtcgctctgttgagtacgacgctggcgttgttgctgtataccgctgcgttatcttctccgcaaacatttcaaacgctcggcggacaagcactgacgacacaaatcttatggggcgtttcttttattaccgctatcgccttgtggtattacacactgtggttgaccatcgctttctttaaacgtcggcgttgtgttcctaaacactatattatctggctgcttatttccgtattgctggcagtaaaagcattcgcttttagtcccgtggaagatggcatagccgttcgccagttgctgtttactttgttggcaaccgcattgatcgtcccctatttcaaacgcagcagccgggtaaaagcgacgtttgtgaatccgtaataaccttacagttaacctgttgtcgcctgctctggattaacggataataggcggcttttttatttcaggccgaaaaatgactgactacctgttactgtttgtcggaactgtactggtcaataactttgtactggtcaagtttctcggtctctgtccgtttatgggggtttccaaaaaactggaaaccgcgatgggcatggggctggcaacaacgtttgtgatgacgctggcgtctatttgcgcctggcttatcgatacgtggattttgatcccacttaatctgatttacctgcgcaccctggcatttattctggtgattgctgtggtcgtgcagttcaccgagatggtggtgcgcaaaaccagcccggtgctttaccgtctgctggggatttttttgccgcttatcaccaccaactgtgcagtgctcggcgtggcgttgctgaatatcaatctcgggcacaatttcttgcagagcgcgctgtacggtttttccgccgctgtcggtttcagcctggtgatggtgctcttcgccgccatccgcgaacgccttgctgtggctgatgtcccggcaccttttcgcggtaatgccattgcgttaattaccgcaggtcttatgtctctggcctttatgggctttagtggtttggtgaagttgtaatgaatgctatctggattgccgttgccgccgtgagcctgctgggcctggcgtttggcgccattctgggttatgcctcccgccgttttgcggtggaagacgatccggtcgttgagaaaattgacgaaatcttaccgcagagccagtgtggtcagtgcggttatcccggctgtcgcccctacgcggaagccatcagctgtaacggtgaaaaaatcaaccgttgcgccccaggtggcgaagctgtgatgctaaaaattgccgagttgcttaatgtcgagccgcagccgctggatggcgaagcgcaagagataacgcctgcgcggatggtggcggttattgatgaaaataactgtattggctgcactaaatgtattcaggcgtgtccggtagacgccatcgttggcgctacccgtgccatgcatacggtaatgagtgatctctgtacgggctgcaatttatgtgttgatccgtgcccgacgcactgcatcagcttgcaaccggtcgcagaaacacctgactcctggaaatgggatctgaacaccattcccgtgcgtatcattcccgtggaacaccatgcttaagttattctctgcattcagaaaaaataaaatctgggatttcaacggcggcatccatccaccggagatgaaaacccagtccaacggtacacccctgcgccaggtacccctggcgcagcgttttgttattccactgaaacagcatattggcgctgaaggtgagttgtgcgttagcgtcggcgataaagtattgcgcggccagccgcttacccgtggtcgcggcaaaatgctgcctgttcacgcgcccaccagcggtaccgttacggctattgcgccccactctacggctcatcctagtgctttagctgaattaagcgtgattattgatgccgatggtgaagactgctggatcccgcgcgacggctgggccgattatcgcactcgcagtcgcgaagagttaatcgagcgcatacatcagtttggtgttgccgggctgggcggtgcaggattcccgacaggcgttaaattgcagggtggcggagataagattgaaacgttgattatcaacgcggctgagtgcgagccgtacattaccgccgatgaccgtttgatgcaggattgcgcggctcaggtcgtagagggtattcgcattcttgcgcatattctgcagccacgcgaaattcttatcggcattgaagataacaaaccgcaggcgatttccatgctgcgcgcggtgctggcggactctaacgatatttctctgcgggtgattccaaccaaatatccttctggcggtgctaaacaattaacctacattctgaccgggaagcaggttccacatggcgggcgtagttccgatatcggcgtattaatgcaaaacgtcggcactgcttatgcagtgaaacgtgccgttattgatggcgagccgattaccgagcgtgttgtaaccctgactggcgaagcaatcgctcgcccgggcaacgtctgggcacggctggggacgccagtgcgtcatttattgaatgatgccggattctgcccctctgccgatcaaatggtgattatgggtggcccgctaatgggctttaccttgccatggctggatgtcccggtcgtaaagattaccaactgtctgttggctccctctgccaatgaacttggcgaaccacaggaagaacaaagctgcatccggtgtagcgcctgtgctgacgcctgccctgcggatcttttgccgcaacagttgtactggttcagcaaaggtcagcaacacgataaagctaccacgcataacattgctgattgcattgaatgtggggcttgcgcgtgggtttgcccgagcaatattcccctggtgcaatatttccgtcaggaaaaagctgaaattgcggctattcgtcaggaagaaaagcgcgccgcagaagccaaagcgcgtttcgaagcgcgccaggctcgtctggagcgcgaaaaagcggctcgccttgaacgacataagagcgcagccgttcaacctgcagccaaagataaagatgcgattgctgccgctctggcgcgggtgaaagagaaacaggcccaggctacacagcctattgtgattaaagcgggcgaacgcccggataacagtgcaattattgcagcacgggaagcccgtaaagcgcaagccagagcgaaacaggcagaactgcagcaaactaacgacgcagcaaccgttgctgatccacgtaaaactgccgttgaagcagctatcgcccgcgccaaagcgcgcaagctggaacagcaacaggctaatgcggaaccagaacaacaggtcgatccgcgcaaagccgccgtcgaagccgctattgcccgtgccaaagcgcgcaagctggaacagcaacaggctaatgcggaaccagaagaacaggtcgatccgcgcaaagccgccgtcgaagccgctattgcccgtgccaaagcacgcaagctggaacagcaacaggctaatgccgagccagaacaacaggtcgatccgcgcaaagccgccgtcgaagccgctattgcccgagccaaagcgcgcaaacgggaacagcaaccggctaatgcggagccagaagaacaggttgatccgcgcaaagctgccgtcgaagcggctattgcacgcgccaaagcacgcaagctggaacagcaacaggctaatgcggtaccagaagaacaggttgatccgcgcaaagcggcagttgccgcggctattgcccgcgctcaggccaaaaaagccgcccagcagaaggttgtaaacgaggactaaatggtattcagaatagctagctccccttatacccataaccagcgccagacaagccgcattatgctgttggtgttgctcgcagccgtgccaggaatcgcagcgcaactgtggttttttggttggggtactctcgttcagatcctgttggcaagcgttagtgctctgttagccgaagctctcgtactcaaactacgcaagcagagcgtagccgcagcgttgaaagataacagtgcattgctgacaggcttattgctggcggtaagtattccccccctcgcgccatggtggatggtcgtgctgggtacggtgtttgcggtgatcatcgctaaacagttgtatggcggtctgggacaaaacccgtttaatccggcaatgattggttatgtggtcttactgatctccttccccgtgcagatgaccagctggttaccgccacatgaaattgcggtcaacatccctggttttatcgacgccatccaggttatttttagcggtcataccgccagtggtggtgatatgaacacactacgcttaggtattgatggcattagtcaggcgacaccgctggatacatttaaaacctctgtccgtgccggtcatagcgttgaacagattatgcaatatccgatctacagcggtattctggcgggcgctggttggcaatgggtaaatctcgcctggctggctggcggcgtatggttgctatggcagaaagcgattcgctggcatattcccctcagcttcttagtaacgctggcgttatgcgcaatgttgggctggttgttcagtccagaaacactggcagcaccgcaaattcatctgctgtctggagcgaccatgctcggcgcattctttattttgactgacccggttaccgcttctacgaccaatcgtggtcgtcttattttcggcgcgcttgcgggcttattagtctggttgatccgcagtttcggcggctatcctgacggcgtggcttttgccgtcctgctggcgaacatcacggttcctctgatcgattactacacgcgtccgcgcgtctacggccatcgcaaagggtaaaccatgctgaaaactatccgaaaacacggcattacgttggcgctatttgcagcgggtagtacagggttaactgcggccatcaaccagatgaccaaaacgacgattgctgaacaggccagtctgcaacaaaaggcgttatttgatcaggtgctgccagccgaacgctataacaatgcgctggcacagagttgctatctggtaactgcgccagagttaggtaaaggtgagcatcgggtttacatcgccaaacaggatgacaaaccggcagccgccgttctggaagcaaccgcgccagatggctattccggtgcgattcagctgctggtgggagccgattttaacggcacggtacttggcacgcgcgtgacagagcaccacgaaacgccagggcttggcgataaaatcgaactgcgcctttctgactggatcacccattttgcgggtaaaaaaatcagtggtgcagatgatgcgcactgggcggtgaagaaagatggtggtgatttcgaccagttcaccggcgcgacgattactccccgcgcggtggttaatgcggtaaaacgcgccggattgtacgctcagacgttaccggcacaactttctcaacttcctgcctgtggagaataaagcgtgagcgaaattaaagacgttattgttcaggggttgtggaaaaacaactctgcgctggtccagttgctcggcctttgtcctctgttggcggtcacgtccactgccactaacgctctgggtttaggacttgcgactacgctggtactgacgctgaccaacctgaccattagcacgctgcgtcactggacgccagccgagatccgcattcccatttacgtgatgatcatcgccagcgtggtcagcgctgtacagatgctgatcaacgcctacgcctttggcctgtatcaaagtttagggatttttattccgctgattgtcactaactgtatcgttgtgggccgcgctgaagccttcgccgccaaaaaaggtccggcgcttagcgcactggacggctttagtattggtatgggcgcaacctgcgccatgttcgtgctgggtagtctacgcgaaattatcggcaatggcacattgtttgacggtgcagatgcgctgttaggtagctgggcaaaagtattacgcgtggagattttccacaccgactcccctttcctgctggcgatgctgccaccaggtgcatttattggcctgggactgatgctggcaggaaaatacctgattgatgaaagaatgaaaaagcgccgtgctgaagcagctgcagaacgtgcattgccaaacggtgaaacagggaatgtctgatgaataaagcaaaacgcctggagatcctcactcgcctgcgtgagaacaatcctcatcccaccaccgagcttaatttcagtagcccttttgaattgctgattgccgtactgctttccgctcaggcgaccgatgtcagtgttaataaggcgacggcgaaactctacccggtggcgaatacgcctgcagcgatgcttgaactgggcgttgaaggggtgaaaacctatatcaaaacgattgggctttataacagcaaagcagaaaatatcatcaaaacctgccgtatcttgctggagcagcataatggcgaggttccggaagatcgtgctgcgcttgaagccctgcccggcgtaggtcgtaaaacagccaacgtcgtattaaacactgcattcggctggccgactattgctgtcgacacgcacattttccgcgtttgtaatcgtactcaatttgcgccggggaaaaacgtcgaacaggtagaagaaaagctactgaaagtggttccagcagagtttaaagtcgactgccaccattggttgatcctgcacgggcgttatacctgcattgcccgcaagccccgctgtggctcttgtattattgaagatctttgtgaatacaaagagaaagttgacatctgaagaaaaggggtaacaccgattaccccattgataacctttctttatcctcttttaaaacatctttttaacgtcaatgatgccattgcttagcgttatcatcaggtaatccgtttgcggataaccaaaaatgcaggttaattgtttttttaatagcgaaattttctattcattcgtgatcaagatcacgatgctgtcgcaatgtaaaaacattgcaagaatcaggttaaaatcatttaaatttacacacgcaacaaatattgacctacaaaacattacactggctatttttcagaaactggactatctcactagtaaaaacgctaaatagcagaacatatcgccgttaagccatcacccccctctcagtgcagtgaaaaaatctgccgttacgttttttgaaaaatttaacgctggataacatttcccggaatggttgaattccccgcctcagttatatgtaacagattattacaaaggacttgtctgaaagtgcaagatagtgaacattacctgccgtttcccctcccactataacaattgcgcgtatgttttttatacataacgcgagaaagcacccccgttaatatgggatgtaaaaaaagaggtaaaagtgtccactgcaaaccaaaaaccaactgaaagcgtcagtttgaacgctttcaaacaaccgaaggcgttctatctcatcttcagcattgagttatgggaacgttttggttattacggcctacaaggaattatggctgtttacctggttaaacaactgggtatgtctgaagcggatagtatcacccttttctcttcctttagtgccctggtttatggtctggtcgctatcggcggctggttaggtgacaaggtactgggtactaaacgcgtaattatgctcggcgctattgtgctggcgattggttatgctctggttgcctggtctggtcacgacgccggtatcgtttatatgggtatggcggctattgcggtcggtaacggcctgtttaaagctaacccgtcttctctgctttctacatgctatgagaaaaacgacccgcgtctggacggtgcattcaccatgtactacatgtccgtcaacatcggctctttcttctctatgattgctacgccgtggctggccgcgaaatacggctggagtgttgcgtttgcgttgagcgttgtaggcctgctgatcactatcgttaacttcgccttctgccaacgctgggttaaacagtacggtagtaaaccagacttcgagcctatcaactaccgtaacctgctgctgaccattattggtgttgtggcactgatcgctatcgccacctggctgctgcacaatcaggaagttgcgcgtatggcgctgggcgttgttgccttcggtatcgtggttatcttcggtaaagaagccttcgcgatgaaaggtgctgcgcgtcgtaaaatgatcgttgccttcatcctgatgctcgaagccattatcttcttcgtgctgtacagccagatgccaacgagtctgaacttctttgcgattcgtaacgttgagcactccattctgggtctggccgtagaacctgagcagtatcaggcactgaacccgttctggatcatcatcggtagtccgattctggccgctatctataacaagatgggcgataccctgccgatgccaaccaagtttgcaatcggcatggtgatgtgttctggtgcgttcctgattctgccgctgggtgcgaaattcgcgtctgacgctggtatcgtgtctgtaagctggctggtcgcaagctatggcctgcagagcatcggggaactgatgatctctggtctgggtctggcaatggttgctcaactcgttccgcagcgtctgatgggcttcattatgggtagctggttcctgaccactgccggtgcaaacctgattggtggttatgttgcgggtatgatggctgtgccggataacgttaccgatccgctgatgagtctggaagtctatggtcgcgtattcttgcagattggtgtcgctactgccgttattgcagtactgatgctgctgaccgcgccgaaactgcaccgcatgacgcaggatgacgctgcagacaaagcggcgaaagcagccgtagcgtaaaattcagggaaactcttttacaagccgctaacttttcgttagcggctttttttttgttcagcaacgcactaccatactttaaaccacagacaaaaggagttaccgatgaaattgttctacaaaccgggtgcctgctctctcgcttcccatatcaccctgcgtgagagcggaaaggattttaccctcgtcagtgtggatttaatgaaaaaacgtctcgaaaacggtgacgattactttgccgttaaccctaaggggcaggtgcctgcattgctgctggatgacggtactttgctgacggaaggcgtagcgattatgcagtatcttgccgacagcgtccccgaccgccagttgctggcaccggtaaacagtatttcccgctataaaaccatcgaatggctgaattacatcgccaccgagctgcataaaggtttcacacctctgtttcgccctgatacaccggaagagtacaaaccgacagttcgcgcgcagctggagaagaagctgcaatatgtgaacgaggcactgaaggatgagcactggatctgcgggcaaagatttacaattgctgatgcctatctgtttacggttctgcgctgggcatacgcggtgaaactgaatctggaagggttagagcacattgcagcatttatgcaacgtatggctgaacgtccggaagtacaagacgcgctgagtgcggaaggcttaaagtaatagccatcggcccacaggtcgttgtgggccgaaatgagatatttcagagctttgttgcgctgaagtaatgttctggtttggcaatacgatcctgagcagccaccacttgcagctcatattcctgcattgctttggtggtcaccatgatttcgtagactgcagcggtcacatgttccagcgcctcctgcagcgttgccccctgaagcagtttcaccagcagtaaaccgctcgtcacatcaccaacacctaccggctggcgcataccaaaatccaccagcggacggctgatatgccaggcttcatcggcggtgaccagcagcatttcaaaacggtcacggctgtagccagctcgcgccaggtgtttaaccaacacaatttgtggcccttgcgcaatgagttcgcgcgctgccagaaccgcttcttcgacgttatttaccgcatgctcacagagtatttccagctcaaccagatttggcgcaatgatatcgctggcaggcaaaccgtgccgcacatgaaactctgcgacacccggtgcaacgatacagcctttttccggatgacccattaccggatcgcaaaaatatttcgcctgcggattcgcggctttcacctgacggacgataccgaggatatgttcaccctgctccgcgcttcccagatagccacttaatacggcatcacaggtgtgtaatttatcaatggcggcaatgccttgcacaatttcggttaaatggctgggcggcatcacgcagccagtccatttgccgtattgggtgtgattagaaaattgaacggtgttcagcggccagacgttcgcgcccaggcggcgcatcggaaactctgccgcactgttacccgcatgaccataaacaacgtgagactggatagcgagaatatttttcatcatgttccctgtataaaaaccagggggagtgatttctcactccccctttccacttaatgcattatttccagcaaatcagacagtaattctttttaccgcgacgcagtaaggtaaaacgaccaaacagacgatcttcttctttaaagaagtattcaggatcggactgtttttcaccgttaatggtgatggcattggaggcgatagttttacgtgcctgaccacgggaaggttgcagttcagaatcgaccagtgcctgcatcaggtctgcgcccttttccatctcaaccatcggtacgccgtcctgcgccagctgttcgaagtccgcttcactcagcgcactcaaagaaccgctgaacaggcattcggtaatacgttttgccgcctgtaaaccttcttcaccgtgaaccagacgagtcacctgctccgccagtacatactgggcgcgcggtgctttaccgctgtttttatcttcttcttccagggcgttgatctcttcaatgctcataaaggtgaagaacttcaggaagcggtaaacgtcggcatccgcagtgttgatccagaactggtagaatttgtacgggctggttttcttcggatccaaccagactgcgccgccttcagttttaccaaatttggtgccatctgctttagtgatcagcggaacggtcaggccaaacacctgattctgatgcagacgacgggtcaggtcgataccagaagtgatgttaccccactggtcagaaccaccaatttgcagcaccacaccgtactgtttgttcagacaggcgaagtcataaccctgcaacaggttgtaggaaaactcagtgaagctaatcccctgatcttcacggttgagacgctgcttaaccgcttctttgttgatcatctggttaacggagaagtgtttgccaatatcgcgcaggaaggtcagcacattcatattgccgaaccagtcatagttgttcgccgcgatagcagagttttctccacagtcgaaatcgaggaacggggcaacctgcttacggattttgtccacccactcctgaacagtttcttcggtgttcagcttacgctcggcagctttgaagctcgggtcgccaatcagacccgtcgcgccgcctaccagcgcaaccggcttgtggcccgcctgctggaagcgtttcaggcataacaatggaacaagatgccccaaatgcaagctgtcagcggtaggatcgaagccgcaatagagcgcgatcgggccttgcgccagtcgctctgctaacgcttcctcgtccgtcacctgggctaccagcccccgctcttgcaattgtttaatcaagttactgcttgccatcaaaatctccatgtatataacgactgcacctttgccggtacacgacttttcgccagatgcgaaagagacatagaataaagtgccagaatcaggagtaccagcgattaaagcaagatttttgcatcttttcagggtgcaagacgatcaatcttccacgcatcattttcacgctggtacaaaaagcggtcatgcaggcgatgctcaccaccctgccagaactcaatctgttcaaggctgacgcgaaaaccgccccaaaagctcggcaatggcacttcgccctgttgaaacttctgcttcagctccaggaatttactttcaaggataccgcgggcagaaatgcgactggactgcttgctaacccatgcaccaatctggctatcacgcgggcggctatgaaaatatttcatcacttcgagagtgctaagtcgttctgctttaccgatcaccatcacctggcgctcaagggtatgccacgggaacagcaggctaacgcgcggattattttcgatttgatgtgctttacggctgccgaggttggtgtaaaacaccatgcctttttcgtcgtaatgtttgagtaaaacgatgcgctgataaggctgaccatgttcatccacggtagcgaccaccatcgcggtagggtccgccagtttggcttcacaagcctgagagagccaacgttcaaaaagggttaatggatcggcgggaagatcgcggcggcgtaacccgcctttggtgtattcacggcgcagatgcgcgatttgctgcaattcgtcgttatcagacatggttttctttacggattgtcagtgggtgacgctattgtgcgccgcccctggaaaaatctcaacgctgtggattttgtaactgacagttattcaagacgatgcggtcgcgtttatagacagtcgcttcatcgcctttgctccagaaaacatagattccgtcagtgtaacgcgcgccagaggcactaatgccctgtttgagatgcagtagttgattatcgtaaacaaaactgacctcctggcgcggattattcagtttgaccgtcaacggtttttcatcacactggtattccagcgtatcggtttgcatgcgctcaaccagctgattaaaggcgctacagccggagagaaggaccggcaaaatgataattaacagttttttcatagtcatatcccgaagactttcctggtctggagggcaatacgccctccctaacgttccaagtgtaacggcagacgcggtaagaaaaattcagttaactctgatatcacgggttagcggggaaaatagcccccagtaccgtctcctggcttgcgccagtgacggaaggcagatttcctggtaatcccgccagcgtccgccaggcaagccaggcgaaagccaatgcttccatgtcatcgccactaatgccaacggcatcggtggtggtgacttctgtgcctggcagtaatgccgccagacgcgccatgagtagcggattacgactacctccaccacataccatcaatcgttcgcagccaccgctcaacaaaacttgttcagaaatggtcacggcggtgagttctgccagtgtcgcctgcacatctcggggatcaacacccggaaaatggcgcaaatggcgctccagccaaccatagttaaagtattcgcgtccggtgcttttcggtgcaggttggctgaaatacgggtcgctgagcatattttgcagcagtgggagaataactttacccgcccgtgcccactcggcatctttatcgtaaggtttaccggcctgacgccagatccaggcatccatcagcatgttaccaggaccggtatcgtagcccccaaccggctgcccaggaatgagcagactcagattggcgatgccgccaatattgagcaccattcgtcgctcggttgggtgagccagcagcgcatgatggaacgcaggtaccagcggtgcgccttgtcctcccaaggcaatatcgcgacggcgaaaatcaccgacaaccgtaattccggtgcgtgccacaatttgattgttatcgccaatctgtaaagtgtgtggtgccacgcccgtcggttcatgccagacggtttgaccgtgacaaccgatcgcaactatatctcttgcctgcagattttgttccttaagcaaggcattgaccgcatcagcaaaaagttgcccgagttgagtatcaagctgtccaaactggctaagtgtaagctgctggccctggcaaatatccagtacagcctgtttcagagataccgggatcggccaactcaaacttgccagctgtgcgacccggtgttcatcaattgtcgccaacacaacatcaacaccatcaaggctggtgccactcataacgccaataaagcggccgcttttcatagttcatcctttttcaatctgacgtttgcgcaccactcaaacataaacttttcgtgaataccatgcggaatgaccgatttttaccgttggtagtaaaacattatcttcaaatcaataatcatcatgaatgttttgtttataattggttgatcctactttcattatgatttgctcatatttggtagaacatgtaaccatggattcacatatgccatatactttgaccatgagggatgcttgcgtggcgtttcatggtgaacaggagatttttcaatgattaaacgcgtattggttgttagtatggtaggtctgtctcttgtcggttgtgttaataacgacaccctgagtggggatgtttataccgcttctgaagcgaaacaagtacagaatgtcagctatggcaccatcgttaacgtacgtccggtacagattcagggcggtgatgattccaacgttatcggtgcaattggcggtgctgttcttggtggtttcctggggaatactgttggtggcggaaccgggcgttctctggctactgcagcaggcgctgttgcaggtggcgtagctggtcagggcgtacagagtgcaatgaacaaaacgcagggtgtcgagctggaaattcgtaaagacgatggtaataccatcatggtggtacagaaacaaggcaacactcgtttctctccgggccaacgtgtcgtactggccagcaatggcagtcaggtgaccgtttctccgcgctaaataagtttgcgtgtggtcaggttactgaccacacgcccccttcatttcaccctttggcctgtaactcaatgatattatgctcaagttttgcgatgagcgtaatcagttgctccagttcctctgcggagatgccatgtaatatttccgcgcgggttttgttaataacagcttccatttcgctgatcagcggctctgccttttccgtcagtttaatacgtttagcccgacgatcgctggcacaagtttgacggctaattaaccctttttcttccagttggtccagagtacggaccagacttggctgctcgatgccaatcgcttttgccagttgaatttggctctggtctggaggtaactgatggatattgtgtaacgtaacccaatgggtttgtgttaactccagcggtttcaggcgatggtctatcagagcacgccatatgcgcaccaaccgtgccagatcagaacctagtgggctttccaatttcatctccttataattagcttgctaagatattatgcggcttttagaatagtgtgcagcaattgtattgctaaaacaaatgtattgctgcatttggttaccgtcagacatatttttcagaaattgcgcgtaaatttttcgcacttaaagaatatttattaatctaacgcaatatattcggtcgtaaaggaatctactttgtgaagtttatgctcaatgcaacaggattgcccttacaagatctggtgttcggtgcgtccgtctactttcctccgtttttcaaagcattcgcgtttggattcgtcatctggcttgtcgtacaccgcctgcttcgtggctggatctacgccggtgacatctggcatcccttgttaatggatttaagcctgtttgcgatttgcgtttgccttgctctggcaatactgattgcgtggtaactatgagtattaaaacaattaagtatttcagtacaatcattgtagcggtagttgcggttcttgccggatggtggctgtggaattattacatgcaatctccgtggacacgcgacgggaaaatacgcgcagaacaggtttctatcaccccacaggtgagcggacgtattgttgagctgaatataaaagacaaccagctggttaacgcgggggatcttctgctcacgatcgataaaacgccctttcagatcgccgagctgaacgcacaggctcagctggcgaaagcgcaatctgacctcgcaaaagccaataacgaagcgaatcgtcgtcgtcatctcagtcaaaattttatttctgccgaagaactcgataccgctaacctcaatgttaaagcgatgcaggccagtgttgatgccgcacaggcgacgctgaaacaggcacaatggcaactggcgcaaacggaaattcgcgccccggtgagtggatgggtgactaaccttactacccgcatcggcgattacgctgataccgggaaaccgctgtttgcccttgtcgacagccacagcttttacgtcattggttattttgaagaaaccaagttgcgccatatccgcgaaggtgcaccagcacaaattaccctctatagtgataacaaaacgttacagggtcacgtttccagtatcggtcgggcgatttatgatcagagcgttgaaagtgacagtagccttattccggatgttaaacctaacgtcccctgggttcgactcgcccaacgcgttcccgtccgctttgcgctggataaagtcccaggcgatgtcacgttggtgagcggcaccacctgtagcattgccgtaggtcaataatgaacgcaagcagttggtccttgcgcaatttgccctggttcagggccacgctggcgcaatggcgttatgcgttacgcaataccattgccatgtgtctggcgctgacggttgcctattatttaaatctggatgaaccctattgggcgatgaccagcgctgcagtggttagctttcccaccgttggcggtgttatcagcaaaagcctcggacgcatcgctggcagtttgctcggagccattgcggcactgcttcttgccgggcatacgctcaatgagccgtggttttttctattgagcatgagcgcgtggcttggcttttgtacctgggcctgtgcgcacttcacgaataacgtcgcgtatgcatttcaactggcgggctacacggctgccatcatcgcctttccgatggttaatattactgaggccagccagctgtgggatatcgctcaggcgcgcgtttgcgaggtaatagtcggtattttgtgcggcggcatgatgatgatgatcctgccgagcagttccgatgctactgcccttttaaccgcattgaaaaacatgcacgcccgattactggaacatgccagtttactctggcagcctgaaacaaccgatgccattcgtgcagcacatgaaggggtgattgggcagatactgaccatgaatttgctgcgtatccaggctttctggagccactatcgttttcgccagcaaaacgcgcgccttaatgcgctgctccaccagcaattacgtatgaccagtgtcatctccagcctgcgacgtatgttgctcaactggcccagtccgccaggtgccacacgagaaattctcgaacagttgctgacggcgctcgccagtagccaaacagatgtttacaccgtcgcacgtattatcgccccgctacgcccgaccaacgtcgccgactatcggcacgtcgccttctggcagcgactacgttatttttgccgcctttatctgcaaagtagtcaggaattacatcgtctgcaaagcggtgtagatgatcataccagactcccacggacatccggcctggctcgtcataccgataacgccgaagctatgtggagcgggctgcgtacattttgtacgttgatgatgattggcgcatggagtattgctagccaatgggatgccggtgccaatgcattaacgctggcagcaattagctgcgtactctactccgccgtcgcagcaccgtttaagagcttgagtcttctgatgcgcacgctggtgttacttagcctattcagctttgtggtcaaatttggtctgatggtccagattagcgatctgtggcaatttttactgtttctctttccactgctggcgacaatgcagcttcttaaattgcagatgccaaaatttgccgcattgtgggggcaactgattgtttttatgggttcttttatcgctgtcactaatcccccggtgtatgattttgctgattttcttaacgataatctggcaaaaatcgttggcgtcgcgttggcgtggttagcgttcgccattctgcgtccaggaagcgatgctcgtaaaagccgccgccatattcgcgcgctgcgccgggattttgtcgatcagctaagccgccatccaacactgagtgaaagcgaatttgaaagcctcacttatcatcacgtcagtcagttgagtaacagccaggatgcgctggctcgccgttggttattacgctggggtgtagtgctgctgaactgttctcatgttgtctggcaattgcgcgactgggaaagccgttccgatccgttaagccgagtacgggataactgtattagtctgttgcggggagtgatgagtgagcgtggcgttcagcaaaaaagtctggcggccacacttgaagaattacagcggatttgcgacagccttgcccgtcatcatcaacctgccgcccgtgagctggcggcaattgtctggcggctgtactgcagccttagccaacttgagcaagcaccaccgcaaggtacgctggcctcttaattacttaattacaccacaggcatagcgttcaccgccaccgcccagcggtttaggttgatcggacatattatcgccgccaacgtggaccatcagcgctttgtctttgatttcatccagacttttcagacgaggcgcgatgacggcatcggtagctttgccgtcattattgacgaccagtgcaggcagatcgcctaaatgcccggcaccttctggcccttcatgtttaccggtattttgtggatcaagatgcccgcctgcggattccgcggcgctggctttgccatctttggtggctggctggcagcttcctttggcatgaatatggaagccatgttcaccggggggtaatgctttcagatcggggctaaactccagacctttatcggtttcagtaatggtgacgctaccaatactctgccctaccccttggctcgtgacgaggttcatctcgactttttcactggcagcttgtgcgccggttgcaacaaccagcgccagaatagccagactaaaacgtttcataggacctccgttcattgtgcattcctgaataagtgtaaaccagtgacacatttttgaacggcggctattcctaaaagtgcttacggtacgtcgtaccccagtgccgctttacggatacgaaaccattgttgacgggtcattttcagtgtttctgcttcgacagctgcccgtacgcgctcaattttaccactaccgataattggcagcggctggcttggtaaacgtaatacccaggcgtaaaccacctgttcaatgctgcccgcgtttaactcctctgccaccacagccagttcatcacgcagcggctggaaataatcatcattaaacagacgaccaccaccaaggcaggaccacgccatcggacgaacacgcagttgttgtagttggtcgagcgtgccatccagcagtaacggctgatgcaccggggatatttccacctgattagtggcaagggtaaacggcagacgactttgcaacagggcaaattgcgcaggcgtaaagttgcttacgccaaaatgacgcactttgccgctctgatgcagatgtttgaacgcgtccgccacttcatcggcatccattaacgggtctggtcggtggattaacagcaaatccagatgatcggtcgcgagattaattaggctctgttcggcgctcttaatgatgtgatcgcggtcagtgatgtaatgaccaatgacgttttcttcacgcgcggtcgtcgcgataccgcatttactgacgatttccatccgttcacgcaggtgaggtgccagtttcagtgcctcgccaaacgccgcttcgcactgatagccaccataaatatcagcatggtccacggtggtcacgccgagatccagatgctcttcaataaaactgaccagctggcgggcggacatattccagtccatcaatcgccagtagcccatcacaaaacgggaaaactccgggccttgcggcgcaatagtaatacgctgaaccataatcgcttcctcttatcagatatgagaggagtatacgcaagattaggttcaaaagagacttggttgctccggttcgtcactactcgctggcttatttgcgcgtaatttgcgcattaatcgctgccgacaaaggcgcagcacctcttgtttttcgccatcgctcattttattccagttaaaacgctcatcacgactacgaaaacagccgcgacaaaacccgcgttcgtcagactggcaaattccccggcacgggctctggacgggaaagaactctaattgctccgccacttcgccctcctcagataagattattaccattattgaagctgttaatgtccaaagtagcaactttgcttgcactagaccgactggtctactacactccaacgcatgaacaaacacaccgaacatgatactcgcgaacatctcctggcgacgggcgagcaactttgcctgcaacgtggattcaccgggatggggctaagcgaattactaaaaaccgctgaagtgccgaaagggtccttctatcactactttcgctctaaagaagcgtttggcgttgccatgcttgagcgtcattacgccgcatatcaccagcgactgactgagttgctgcaatccggcgaaggtaactaccgcgaccgcatactggcttattaccagcaaacactgaaccagttttgccaacatggaaccatcagtggttgcctgacagtaaaactctctgccgaagtgtgcgatctgagtgaagatatgcgcagcgcgatggataaaggtgctcgcggcgtgatcgccctgctctctcaggcgctggaaaatggccgtgagaaccattgtttaaccttttgtggcgaaccgctgcaacaggcacaagtgctttacgcactgtggcttggcgcgaatctgcaggccaaaattagccgcagtttcgagccactggaaaacgcgctggcccatgtaaaaaacattattgcgacgcctgccgtttaacaggcattttttatcaccagacgaccgggagcctttatgagttctgaaaaactgtattccccactgaaagtgggcgcgatcacggcggcaaaccgtatttttatggcaccgctgacgcgtctgcgcagtattgaaccgggtgacattcctaccccgttgatggcggaatactatcgccaacgtgccagtgccggtttgattattagtgaagccacgcaaatttctgcccaggcaaaaggatatgcaggtgcgcctggcatccatagtccggagcaaattgccgcatggaaaaaaatcaccgctggcgttcatgctgaaaatggtcatatggccgtgcagctgtggcacaccggacgcatttctcacgccagcctgcaacctggcggtcaggcaccggtagcgcctagtgcacttagcgcgggaacacgtacttctctgcgcgatgaaaatggtcaggcgatccgtgttgaaacatccatgccgcgtgcgcttgaactggaagagattccaggtatcgtcaatgatttccgtcaggccattgctaacgcgcgtgaagccggttttgatctggtagagctccactctgctcacggttatttgctgcatcagttcctttctccttctagtaaccatcgtaccgatcagtacggcggcagcgtggaaaatcgcgcacgtttggtactggaagtggtcgatgccgggattgaagaatggggtgccgatcgcattggcattcgcgttagtccaatcggtactttccagaacacagataacggcccgaatgaagaagccgatgcactgtatctgattgaacaactgggtaaacgcggcattgcttatctgcatatgagtgaaccagattgggcggggggtgaaccgtatactgatgcgttccgcgaaaaagtacgcgcccgtttccacggtccgattatcggcgcaggtgcatacacagtagaaaaagctgaaacgctgatcggcaaagggttaattgatgcggtggcatttggtcgtgactggattgcgaacccggatctggtcgcccgcttgcagcgcaaagctgagcttaacccacagcgtgccgaaagtttctacggtggcggcgcggaaggctataccgattacccgacgttgtaatccaacattgcgagcggcgtaaagccgccgctatactaaaacaacattttgaatctgttagccattttgaggataaaaagatgcgtcttcttcataccatgctgcgcgttggcgatttgcaacgctccatcgatttttataccaaagtgctgggcatgaaactgctgcgtaccagcgaaaacccggaatacaaatacagtctggcgtttgttggctacggcccggaaaccgaagaagcggtgattgaactgacctacaactggggcgtggataaatacgaactcggcactgcttatggtcacatcgcgcttagcgtagataacgccgctgaagcgtgcgaaaaaatccgtcaaaacgggggtaacgtgacccgtgaagcgggtccggtaaaaggcggtactacggttatcgcgtttgtggaagatccggacggttacaaaattgagttaatcgaagagaaagacgccggtcgcggtctgggcaactaatctcctgccgggcgtgaactcatcgcgcccgcatctttactgcatcgacaagtaatatttgtcataatgcgcgctgcaatttatccgtattaagagaatcagatgtccgataacgctcaacttaccggtctgtgcgaccgttttcgtggtttttatcctgttgtgatcgatgttgaaacagccggatttaacgccaaaaccgatgcgctgcttgagattgccgccatcaccctgaaaatggatgaacaaggctggctgatgccggacaccacattacatttccacgtcgaaccatttgtcggcgcaaatttgcaaccagaagccctcgccttcaacggcattgacccgaacgatcccgatcgcggcgcggtcagcgaatacgaggcgctgcacgaaatttttaaagttgtacgtaaaggtattaaagcgagcggctgtaaccgcgccattatggtggcgcacaatgccaattttgatcacagctttatgatggccgccgcagaacgcgccagtctgaaacgtaacccgttccaccctttcgccacttttgacactgctgcactggccgggctggcactcggacaaaccgtattgagtaaggcttgccagaccgctggcatggacttcgacagcacccaggcgcactccgcgctgtacgacaccgaacgcactgctgtgctgttttgtgaaatcgtcaaccgctggaaacgtctgggaggctggccgctatctgccgccgaagaggtgtaatcgagtcgatgcctgatgacatgcaatgattcaggcatctatagtgaggctattccacgcatcctgcatgatattcacggggaatagcgttaatggcagataatccagaccctagtagcctcctgccggacgtgtttagtccggcgacccgcgactggtttcttcgcgcctttaaacagccgaccgctgtccagccgcaaacctggcatgtggcggcgcgaagcgaacatgcgctggtgattgcaccgaccggctccgggaaaacgctggcagcatttctctacgccctcgatcggctcttccgcgaaggcggcgaagatacccgcgaggcgcataagcgtaaaaccagtcgcatcctctatattagtccgataaaagccctgggcaccgacgttcagcgcaacttgcagatcccgttgaagggtattgccgatgaacggcggcggcgcggcgaaacggaagtcaatcttcgcgtagggatccgtactggcgatacgcctgcacaggaacgcagcaaactcacccgtaatccgccggatattctgatcaccacacccgaaagtctctatctgatgctgacctcccgcgcgcgcgaaacgctacgcggcgtcgaaacggtaattattgatgaagtccacgcggtagcgggcagtaaacgtggtgcgcatctggcgttaagtctggagcggctcgatgcgctgctccacaccagtgcacagcgaattggcctttctgccactgtgcgcagtgccagcgatgtggcagcatttcttggtggcgatcgcccggttacggtagtcaacccgcccgcaatgcgccatccgcagatacgaattgtcgtaccggtcgccaatatggatgatgtcagtagcgtcgccagcggcaccggcgaagacagccatgccggccgggaaggctccatctggccatatattgaaacgggtatccttgatgaagtgttgcgccatcgcagcaccattgtctttactaatagccgggggctggcggaaaaactgacggcacgattaaatgagctttacgccgcacgcttacagcgttccccgtctatcgccgttgatgcggcccatttcgagagcacctccggcgcaacctctaaccgtgtacaaagtagcgacgtttttattgcccgcagtcaccacggctccgtctctaaagaacaacgagcaatcaccgaacaggcgctgaaaagcggtgaattacgctgcgtggtcgcaacctccagtcttgaactggggattgatatgggcgcggtggatctggtgattcaggtggcaacgccgctttctgttgccagtgggttacaacgcattggtcgcgccggacatcaggttggcggtgtatctaaagggctgtttttcccccgtacccggcgtgatttagtcgattccgcagtcattgtagagtgtatgttcgcaggcaggctggaaaacctgacaccaccgcataatcctctcgacgtccttgcgcagcaaaccgttgccgccgcggcgatggatgcattacaggtagacgaatggtactcccgcgtacgccgtgccgcaccgtggaaagatctgccaagacgtgtttttgacgccacgctggatatgctttccgggcgctatccctctggcgatttttctgcttttcgccccaaactggtctggaacagggagaccgggatattgaccgcccgacctggcgctcaattgttggcggttaccagcggcggcaccattccggatcgtggcatgtatagcgtgttattacccgaaggtgaagaaaaggccggtagccggcgggtgggtgaactggatgaggagatggtatatgagagccgggtgaacgacattatcactctcggcgctaccagttggcggatccagcaaatcacccgcgatcaggtgattgtgactcctgctccgggtcgttctgcccggctccccttctggcgtggtgaaggtaacggacgtccggctgaattaggcgagatgatcggcgattttcttcatttgctggcggatggcgcgttcttttccgggactattcccccgtggctggcagaagaaaatacgatcgccaatattcaggggttgattgaggagcagcgcaacgcgacgggcatcgttccggggagtcgccatctggtcctcgaacggtgccgtgatgaaattggtgactggcgtattattttgcactctccctatggaagacgggtgcatgaaccctgggcggtggcgattgccgggcgaatacatgcgctatggggcgctgacgcgagcgtggtcgccagtgatgacggcattgttgcacgtattcctgacaccgatggtaaattgcccgatgccgcgatttttttgtttgaaccagaaaagttgctgcaaattgtccgcgaggcggtaggcagcagcgcacttttcgccgcccgttttcgcgaatgcgccgcgcgggcattattaatgccggggcgcactccgggccatcgcaccccgctttggcaacaacggctgcgcgccagtcagttgctggaaatcgctcagggatatccggattttccggtcattctcgaaaccctacgcgaatgtctgcaagatgtttatgatcttcccgcactggaacgtttgatgcgtcgcctgaacggtggcgaaattcaaatatccgatgtaacgaccactacgcccagccctttcgccacaagtttattgttcggctatgtcgcggaatttatgtaccagagcgacgccccgctggcagagcgccgggcatccgtactgagcctggacagcgagttactgcgcaatctactcggacaggtcgatccgggggaattactcgacccgcaggtcattcgccaggtggaagaagagttgcaacgactggctcctggcagaagagcgaaaggtgaagaaggattgttcgacctgctgcgcgaactggggccaatgaccgttgaagacctggcgcaacggcatacaggcagcagtgaagaggttgcgagctatctggaaaatcttcttgcagtaaaacgaatcttcccagcgatgattagcggacaggagcgtcttgcctgtatggatgatgccgccaggctgcgtgatgccctcggcgtacgactaccagagagtttgccagagatttatttacatagagtcagttacccgcttcgcgacctctttctgcgctatctccgggctcatgctctggtcacggctgaacaactggctcatgagtttagtctcggtattgccattgtcgaagagcagcttcagcaactgcgtgaacagggtctggtgatgaatctgcaacaagacatctgggtgagcgatgaagtatttcgtcgtctgcgtttgcgcagcctgcaagccgccagagaagcgacgcgtcccgttgcagccacgacctatgcgcgattgctgctggaacgtcagggcgtattacccgccaccgatggtagcccggcgctctttgccagtacaagcccaggcgtttatgagggcgtagatggcgtgatgcgggtgatcgaacagcttgccggagtcggtttacccgccagtctctgggaaagccagatcctgcctgcccgcgtacgcgactatagcagtgaaatgctcgatgaattactggcaaccggtgcggttatctggagcgggcaaaaaaaactgggtgaagatgacggcctggtggcactgcatctacaggaatatgctgcagaaagcttcactcccgccgaagcggatcaggcgaatcgtagcgcgctgcaacaagcgatagtcgctgttctggctgacggaggagcctggtttgcacaacaaatcagccaacggatacgcgacaaaatcggcgaaagcgttgatctctctgccctgcaagaggcgttatgggcgctggtctggcaaggcgtcatcaccagcgacatttgggcaccgttacgcgccctcacccgcagcagttccaacgcacgcaccagtactcgccgcagtcaccgggctcgtcgtggacgtcctgtctatgcgcaacccgtcagcccgcgggtatcttacaacacaccaaatctggctggacgctggagcttattgcaggtggagccactaaacgataccgaaaggatgctggcgctggcggaaaatatgctcgaccgctacggcatcatcagtcgtcaggcggtgatagccgaaaatatccctggcgggtttccaagcatgcaaacgctttgtcgaagtatggaagactccgggcgaattatgcgaggtcgttttgtagaaggtctgggtggcgcgcaattcgctgaacgtctgactattgaccgattgcgcgatctggcgacacaagccacgcaaacgcgccactatacaccagtggcgctctctgccaacgatccggctaatgtgtggggaaatcttctgccctggcctgcacatccggcaacgctggttccaacgcgtcgggcgggtgcgctggtggtcgtttctggcggcaaattgttactctatctggcgcaaggtggcaaaaaaatgctggtctggcaggaaaaagaggaattactcgccccagaggttttccacgcgctgactaccgcactgcgtcgcgaaccacggctgcgctttacgctaacagaagtgaatgatctaccggtccggcaaacgccgatgtttacgctgctgcgtgaggcgggatttagtagtagcccacaagggctggattggggataaagaaaggactgacggatgcccgttcgcatccgtcagtattgcaggacggattattccgcgtccggctcttcagacttgtatttagcggcagtttctttgatcagctgctgcagttcgccacgctgatacatttcgatcacgatatcacaaccgccgaccagctcgccgtcaacccacagttgcgggaaggtcggccagttagcatatttcggcagttccgcacgaatgtccggattctgcagaatatcaacataggcaaaacgttcgccacatgcggcaagcgcctggactgcctgggcagagaaaccgcagctcggcagtttcggactacctttcatgtacagcaggatcgggttttcagcaatctggcgttggattttttcgatagtggtgctcattgtcttgcttcctcaaacttctttacggcagtaatctgacattgtagcgggtcagtgcggcatcggaaaataacattttcatcacgcttttgctattttatccctttgctctatttgttgcatttcaaatattcgtttcttctctgatgccggcaaactggcgtatttataaccatttttagctttcactgctgcatttttttgcgctcgccaacgaaacgtattttttaacaataaaagctattaactttctcttcttctatgcattagaatcatcaagttttgtaaatcagacgcaggcatgatagacctgcctttacagagggacgctcagtggcgcggataaaccgtattagcatcacgctctgtgctttactttttaccaccctgcctttaacgcctatggcccatgctagtaagcaagccagggagagttctgctaccactcatatcaccaaaaaagcagataaaaagaaaagcacggcaaccaccaaaaagacccagaaaacagcgaaaaaagccgccagtaaaagtacgaccaaaagcaaaaccgcttcttccgttaaaaaatcttccattaccgcttctaaaaacgccaaaactcgcagcaaacacgccgtcaataaaacggccagtgccagctttaccgaaaagtgtaccaaacgtaagggctataaaagccattgtgtgaaagtcaaaaatgccgcgagtggaactcttgccgacgcgcacaaagcgaaggtgcaaaaagctacgaaagtggcaatgaataaactgatgcagcaaattggtaagccatatcgttggggtggcagcagtccgcgtaccggttttgattgcagcggcctggtttattacgcttataaagatttggtgaaaattcgtattccgcgtacggcgaatgaaatgtatcacctgcgtgatgcagcgccaatcgaacgtagtgaactgaaaaacggcgacctggtctttttccgtactcagggacgcggcacagccgatcatgtcggcgtgtatgtcggcaacggcaaatttattcagagtccgcgcacaggtcaggaaattcaaatcacttctctcagtgaagactactggcagcgccactatgttggcgctcgtcgggtaatgaccccaaaaacacttcgctaaaactttaccctgttgttacggcaacagggtaagttcatcttttgtctcaccttttaatttgctaccctatccatacgcacaataaggctattgtacgtatgcaaattaataataaaggagagtagcaatgagtttcgaattacctgcactaccatatgctaaagatgctctggcaccgcacatttctgcggaaaccatcgagtatcactacggcaagcaccatcagacttatgtcactaacctgaacaacctgattaaaggtaccgcgtttgaaggtaaaagtctggaagagattattcgcagctctgaaggtggcgtattcaacaacgcagctcaggtctggaaccatactttctactggaactgcctggcaccgaacgccggtggcgaaccgactggaaaagtcgctgaagctatcgccgcatcttttggcagctttgccgatttcaaagcgcagtttactgatgcagcgatcaaaaactttggttctggctggacctggctggtgaaaaacagcgatggcaaactggctatcgttagtacctctaacgcgggtactccgctgaccaccgatgcgactccgctgctgaccgttgatgtctgggaacacgcttattacatcgactatcgcaatgcacgtcctggctatctggagcacttctgggcgctggtgaactgggaattcgtagcgaaaaatctcgctgcataataactgatggcaaatgcagcattgcctgaagcgctacgcttatcaggcctacgcggatcatcgatgtaggtcggataaggcactcgccgcatccggcaagataaatcgcacgttgtcagcaactgtaacgcagaaggttatccttctgcgtttttgtttaattagctgttagcaacgcaaactgtttcaggttgttttctggcactcataaacaccagcaataatgccagtcccgcgacaatcgctcccatcaccggcacaaagctgtatcccagcccagcggaaattaccgcaccaccagcagctgctcccagcgcatttccaagattaaaggcaccaatattgacactactagacagacctggcgcttcactggcgacacgcatcacgcgcatctgtaacggcggtacgaccgcaaaggttgctgcgccccacaccaccatgctaatagctgcgccgaactcattgcgggccaggaacgggattgccagcataatcaccatcaacaacaacaaaaagcctttcaacgtgccgttaacactacgatctgccagtttgccgccgagatagttaccgatagagaatccgacaccaatcagcaccagcattgccgtgacgaacaccggtgttgcgtgggtaatactttgcagtaccggagagatataggtgtagagagtaaacattgcaccagctcccagtaccgtcgtcagcaatgcagacagcacctgcggacgcattaataccgccagctcttttttcacttcaggtcgtgcccctgcaccacctttaggtaaactgaagaacagacttaccatactaatcactcccagccccgccgttgccagaaaactcatccgccagccgatggtttcacccaaccaggtcgccgccggcacgccaccgatatttgccagggttaaccccataaacatagtggcaactgcgctggcctgtttatgttttggcaccacgcttgcggccacgacactacccaaaccaaaaaatgctccgtgattcaggctggtcaaaatgcgactaagcatcagggtcatataatccggcgcgatggcggaaagtacgttgccgagcgtgaaaattgccatcaggaaaatcaacgcactgcggcgggcacgatgagaaagtagaagcgtcatcagcggcgcgccaaccattacgccaactgcataggcactgattaacattccggcagcgggaatgctgacatccacaccgcgcgcaatgacgggcaacaagcccattgggctgaactccgttgtcccgataccaaacgcgccaatcgccagcgccagcaacggatagttaattttcatgccttatctccacctcttcgcgtcattacgcgatattcattaaagtggcgaaagcatgacagcaatcacaaaaaaatgaaaataacaaaaagagaaaacacttttgccattttgctaacaaacaggaaggagatgcgagggagaacgcgctccctcgagaggaaatcagtgcagcgcggcagtcaaacccacggctacgatcaaaccgaggacgataatcgttgttaccagtgaaaatttaaggtcggtgctcatcaagttttctccttttttattaccacacaaaaagtgatattacgcatttttacacactgtgatgaaaaaatctcccgtcatttataatgataagtgtttttaccacttccccttttcgtcaagatcggccaaaattccacgcttacactatttgcgtactggccattgaccccttcctgacgctccgtgtcgtttttccggcgtaccgcaacacttttgttgtgcgtaaggtgtgtaaaggcaaacgtttaccttgcgattttgcaggagctgaagttagggtctggagtgaaatggaatggcaacaataaaagatgtagcgaaacgagcaaacgtttccactacaactgtgagtcacgtgatcaacaaaacacgtttcgtcgctgaagaaacgcgcaacgccgtgtgggcagcgattaaagaattacactactcccctagcgcggtggcgcgtagcctgaaggttaaccacaccaagtctatcggtttgctggcgaccagcagcgaagcggcctattttgccgagatcattgaagcagttgaaaaaaattgcttccagaaaggttacaccctgattctgggcaatgcgtggaacaatcttgagaaacagcgggcttatctgagcatgatggcgcaaaaacgcgtcgatggtctgctggtgatgtgttctgagtacccagagccgttgctggcgatgctggaagagtatcgccatatcccaatggtggtcatggactggggtgaagcaaaagctgacttcaccgatgcggtcattgataacgcgttcgaaggcggctacatggccgggcgttatctgattgaacgcggtcaccgcgaaatcggcgtcatccccggcccgctggaacgtaacaccggcgcaggccgccttgccggttttatgaaggcgatggaagaagcgatgatcaaggtgccggaaagctggattgtgcagggtgactttgaacctgaatccggttatcgcgccatgcagcaaatcctgagccagccgcatcgccctactgccgtcttctgtggtggcgatatcatggcaatgggcgcactttgtgctgctgatgaaatgggcctgcgcgtcccgcaggatgttagcctgatcggttatgataacgtgcgcaacgcgcgctattttacgccggcgctgaccacgatccatcagccaaaagatagcctgggtgaaacagcgttcaacatgctgttggatcgtatcgtcaacaaacgtgaagaaccgcagtctattgaagtgcatccgcgcttgattgaacgccgctccgtggctgacggcccgttccgcgactatcgtcgttaatcacccgttgcgggagtctcttccggctcccgcagccactccttattcagcgtctcactatcgccgagatactcaagcaaccaggttaacgcagggctcatatcattttgctgccatgtcagacaacatgcgctatccggaaaggggttttccagttctaatgctacccacttcccctcattaagccacggtttggcgaaatgtgttggcaccatccctatgcataatcctgcgctgatacaggttgcgctactttcccagtcaggcacgacaactcttttttggttatccagcaaccaggtaatacgtttaggtagcgttcggctggtgtcttcgcgcaccaagctcggccagttgcgcaacgtatcatcgctgaacgggccatccatcaacgccagcgggtggtgactggcaacaacgcaactccagcttagcatccccatatcccggaaggcataacgaccgcctaccggaatcgcgcgtgttgcgccaatcgccagttccacgcgcccgtcggaaagcgcatcccagacaccgttgaacacttcctgaaagacaagaagttcgacatcatcaaaatggcgataaaaatcaacgatcatctgccgtgtacgttctggcctgacaatattatccactgcgatagctaactgaccgcgccagccgttcgctatctgctgacattgctggcgggtgatctgcatttttttgacaacagagcgcccttctttgagaaaccacgctccagcagcggtcagctccacatcacggtgccgtcgttcaaagagcggcaccgccagccactcttccagctgacgcacggtatagctgaccgcagaaggaacgcgatgcagctcctgtgccgcagcgctaaaactaccattacgcgctaccgcatcaacaacttcgagactatattcactccacatagtctgcctgcaaaatttttgaaaccagtcatcaaatattaccgtttcacaacactaatttcactccctacactttgcggcggtgtttaattgagagatttagagaatatacatgcaacctgggaaaagatttttagtctggctggcgggtttgagcgtactcggttttctggcaaccgatatgtatctgcctgctttcgccgccatacaggccgacctgcaaacgcctgcgtctgctgtcagtgccagccttagtctgttccttgccggttttgccgcagcccagcttctgtgggggccgctctccgaccgttatggtcgtaaaccggtattattaatcggcctgacaatttttgcgttaggtagtctggggatgctgtgggtagaaaacgccgctacgctgctggtattgcgttttgtacaggctgtgggtgtctgcgccgcggcggttatctggcaagcattagtgacagattattatcctagtcagaaagttaaccgtatttttgcggccatcatgccgctggtgggtctatctccggcactggctcctctgttaggaagctggctgctggtccatttttcctggcaggcgattttcgccaccctgtttgccattaccgtggtgctgattctgcctattttctggctcaaacccacgacgaaggcccgtaacaatagtcaggatggtctgacctttaccgacctgctacgttctaaaacctatcgcggcaacgtgctgatatacgcagcctgtagtgccagtttttttgcatggctgaccggtagtccgttcatccttagtgaaatgggctacagcccggcagttattggtttaagttatgtcccgcaaactatcgcgtttctgattggtggttatggctgtcgcgccgcgctgcagaaatggcaaggcaagcagttattaccgtggttgctggtgctgtttgctgtcagcgtcattgcgacctgggctgcgggcttcattagccatgtgagcctggtcgaaatcctgatcccattctgtgtgatggcgattgccaatggcgcgatctaccctattgttgtcgcccaggcgctgcgtcccttcccacacgcaactggtcgcgccgcagcgttgcagaacactcttcaactgggtctgtgcttcctcgcaagtctggtagtttcctggctgatcagtatcagcacgccattgctcaccaccaccagcgtgatgttaagtacagtagtgctggtcgcgctgggttacatgatgcaacgttgtgaagaagttggctgccagaatcatggcaatgccgaagtcgctcatagcgaaagtcactgatctatatcgatatacttatacttaggctgctaacaaaattttgttgtatgattgaaattagcggcctatactaatttcgagttgttaaagctacgataaatattatgtttttacggggacaggatcgttcccgactcactatggatagtcatttcggcaagggttcctcctttccctctgttctacgtcggattatagactcgcggttttttctgcgagatttctcacaaagcccaaaaagcgtctacgctgttttaaggttctgatcaccgaccagtgatggagaaactatgagtagtagctgtatagaagaagtcagtgtaccggatgacaactggtaccgtatcgccaacgaattacttagccgtgccggtatagccattaacggttctgccccggcggatattcgtgtgaaaaaccccgatttttttaaacgcgttctgcaagaaggctctttggggttaggcgaaagttatatggatggctggtgggaatgtgaccgactggatatgttttttagcaaagtcttacgcgcaggtctcgagaaccaactcccccatcatttcaaagacacgctgcgtattgccggcgctcgtctcttcaatctgcagagtaaaaaacgtgcctggatagtcggcaaagagcattacgatttgggtaatgacttgttcagccgcatgcttgatcccttcatgcaatattcctgcgcttactggaaagatgccgataatctggaatctgcccagcaggcgaagctcaaaatgatttgtgaaaaattgcagttaaaaccagggatgcgcgtactggatattggctgcggctggggcggactggcacactacatggcatctaattatgacgtaagcgtggtgggcgtcaccatttctgccgaacagcaaaaaatggctcaggaacgctgtgaaggcctggatgtcaccattttgctgcaagattatcgtgacctgaacgaccagtttgatcgtattgtttctgtggggatgttcgagcacgtcggaccgaaaaattacgatacctattttgcggtggtggatcgtaatttgaaaccggaaggcatattcctgctccatactatcggtagcaaaaaaaccgatctgaatgttgatccctggattaataaatatatttttccgaacggttgcctgccctctgtacgccagattgctcagtccagcgaaccccactttgtgatggaagactggcataacttcggtgctgattacgatactacgttgatggcgtggtatgaacgattcctcgccgcatggccagaaattgcggataactatagtgaacgctttaaacgaatgtttacctattatctgaatgcctgtgcaggtgctttccgcgcccgtgatattcagctctggcaggtcgtgttcagtcgcggtgttgaaaacggccttcgagtggctcgctaaaggctattctatcgccccctctccgggggcgatttcagatcaggcttctgtgcctggttgattcatggcattttctcgtgccgccagcacacgttctaccgtatctaccactgcctgagtttgtggatcgatttcaatgttgacgcgtgcgccaagttttttcttcccaagagtcgtgcgttccagtgtttcccgaattaaatggacgcaaaaacgcgttggcgtgacttcgccgacggtcaggctaataccgtcgatgccaataaatcctttgtacagaatatatttcatcaactgactatcctggactttaaaccagatctggcgattattttcactggttaatattttcgccacttcagcagtggtcataatatgaccactcattaagtgtccgccaatttcatcactgaatttcgccgcacgctcaacgtttacccaatcccccacttttaaatcgccaagattggtaatgcgtaacgtttctttcatcaggtcaaaactgacatggttgccgttaatttccgtcacggtcaggcagcaaccgttatgcgccacggaagcaccggtttccaggccgtccagcatgtggtcgggtaactccaccacatgcgtacgaaaatttggtttctcgtcaatgctcaccagttttgcggtgccctgtacaatccccgtaaacatacttacaactcctgaaatcagttaagacattctgttcagcacaatagcaggtggaaaacgcccttaccagtgaaggggtaagaatggctattttttcactggagaattaataaatcctcgctacaatagactgaatttcccctgcttcttctttttgctgcccattcaggcggctttttagtctctcatataactacaaataaaaggtgttcacgtgcagaagtatatcagtgaagcgcgtctgttattagcattagcaatcccggtgattctcgcgcaaatcgcccaaactgcgatgggttttgtcgataccgtgatggcgggcggctatagtgccaccgacatggcggcggtcgctatcggtacttctatctggcttccggcgatcctctttggtcacggactgctgctggcattaacgccggttatcgcgcaattaaatggttccggtcgacgtgagcgcattgcgcatcaggtgcgacaaggtttctggctggcaggttttgtttccgttctcattatgctggtgctgtggaatgcaggttacattatccgctccatggaaaacatcgatccggctctggcggacaaagccgtgggttatctgcgtgcgttgttgtggggcgcgccgggatatctgttcttccaggttgcccgtaaccagtgtgaaggtctggcaaaaaccaagccgggtatggtaatgggctttatcggcctgctggtgaacatcccggtgaactatatctttatttatggtcatttcggtatgcctgagctcggtggcgttggttgtggcgtggctactgcggcggtgtattgggtcatgttccttgccatggtttcttacattaaacgcgcccgctccatgcgtgatattcgtaacgaaaaaggcaccgcaaaacccgatcctgcggttatgaaacgactgattcaactcggtttgccgattgcgctggcactgttctttgaagtgacactgtttgccgtcgtggctctgttagtgtctccgctcggtattgttgatgtcgcaggacaccagattgccctgaactttagtagtctaatgttcgtgcttccaatgagcctggcggcagcggtaactatccgcgtaggttatcgtctgggtcagggcagtacgctggatgcgcaaaccgctgcgcggaccgggcttatggtgggtgtctgtatggcaaccctgacggccattttcacggttagtctgcgggagcaaatcgccctgttgtacaacgacaatcccgaggttgtaacgctggctgcgcatttgatgttgctggcggcggtatatcagatttctgacagtatccaggtgattggcagtgggattttgcgtggttataaagatacgcgttccattttctatattacctttacggcttactgggtgctgggcttgccaagcggctatattctggcactgaccgatctggtcgttgaacctatggggccagcaggcttctggataggctttattattggcctgacgagcgcagccattatgatgatgttgcgtatgcggttcctgcaacgtctgccgagtgccatcattctgcaacgagcatcccgctaataaagacaaggcgcaaccttcacgggttgcgcctgtatttttacgcaggctggagcgttgcgccaatcccgtcttcgtctggctgtaatttcagagcgttacacagagtttgccgactggcatctgttatctcaacgtgtatatccccggtaacttcccctttcacattgatgaagtcaggactaatttcttttgcactggtttgcaggcaaatcgctccctctccgcgcaggcgtttcactttcagttgcacatgcgttgccgcatcagtgatcagccacagttttccaccattcagattgatgttaccaacaatgaaagtgacactgtcaccttttaccgtactgccgtctagaatcaacacaccgccctgctgtacagtaatcgtactttgttgcagctctgcgccataaccaataatcatactagcgccgtccagtaatgcaacactcccggtcagttcaaccggtgcgcgatcttcctctacgacaaaattttcgtccgcgctggtgggactcaacaggatcactgtcccaccttgtattaccgcgttttccagcgtaccggcatgcacttcagcccgaccacccacattcacggacaggttttgcgtcttaccggaactgtagagctgaaggccatccgtccccagacgataaatggatccattctcaacaatagtgtcagagtcttcaccaccgagattattcatggtgccaccagcaagcaacgtatcactggctttcccggccagcataaaaacgccgccctgattaatctcacaattgctggcttccccacctggatacaccaacaattcaccaccttcatctaccacgaccgcactggttgtcccattaaccaacaggccgccctcttgatcgagaatgattttttccgcgcgatgtccttccagtacacgcaggttaccgccattttccagcaacaaaccgcaggcataacctttatcaacgctgaattcaccttcgggatggcggccattaaccgtagcgagcgtagagagactaattgcgcctccctcggactgaacaatatctgtggcaatggcaccatcgctgacgcttagcgtgccattgttaccgtactgtgtgcatttggcgatcccaccggttgccactttcaaccagccagcccccgtgaccacggtattttcggctcttccgccagcttcaacaatcaactcgccttcagtaagttgcgtcgcgccaatgacctcgccggtcttaacaatttgcacgttcccgtcgctcatcaagtttttcgcatcagatcccatgatttattcctttgctgcatctgtgtgcctttattgctacctaagtgtaaaggctacggaggatttatccacgacagatttgagatggtggcaaacaactctgtttaaactctgatacacgaattattgggttgtatcagatgtaaatgcgatcctgaataaaaatcacccttgcaaatcaacaaaatatagccaatttgcttaaaagctctgcaaacggtcgaaatagcgcagaaaattacgttttgcctcttgccaccttcccactctgccgctaatattcgtccccgttgtcacctacaacgttgcgttcatagctcagttggttagagcaccaccttgacatggtgggggtcgttggttcgagtccaattgaacgcaccatcctgcgtccgtagctcagttggttagagcaccaccttgacatggtgggggtcggtggttcgagtccactcggacgcaccagattttcttaatctggtcttctcctttttccctctgtttcttctctgtatccaatacgttaaaagatttacactgtcttcgtatgcgttatcagaaggagaatcgctatggcaactttgttacaacttcattttgcttttaatggcccatttggcgacgcaatggctgagcagcttaaaccacttgctgagagcattaatcaggaacctggttttctgtggaaggtatggacagaaagtgaaaagaaccacgaagccggtgggatctaccttttcactgatgaaaaaagcgcccttgcctatctggaaaaacatactgcccgactgaaaaatctcggcgttgaggaagttgtcgccaaagttttcgatgtcaatgagccacttagtcaaatcaatcaggcaaaactcgcctgacagaatttaatcaagggcggttagcgcccttttcatccctgtctgaaatttctcaaattctaaaaatctcaaccaaacttatctgataacactaaattcgaaagaatgcgtacaggtaagtaacaatgaaaaaaattgctattgtgggtgccgggcctacggggatctacaccttattcagccttctacagcaacaaactccactttctatttctatcttcgagcaggctgacgaggccggtgtcgggatgccatacagtgatgaggaaaacagtaaaatgatgctggcaaatattgccagtattgaaataccgccgatttattgtacgtatctcgaatggctacaaaagcaagaagacagccatctccagcgttatggcgttaaaaaagaaaccttgcacgatcgtcagtttttaccgcgaattctgctgggcgaatatttccgcgatcaatttttacgactagtagaccaggcacgacagcaaaaatttgcagtggctgtttatgaaagttgccaggttaccgatctgcaaattacaaatgctggcgtcatgctcgctacaaatcaggatttacccagcgagacgtttgatttagcggtgatcgccacgggtcacgtctggcctgatgaagaagaagcaacccgaacgtattttcccagcccgtggagtggcctgatggaagcaaaggtcgatgcgtgtaacgtgggtattatgggaacatccttgagcggactggatgcggcaatggcagtggctattcagcatggtagcttcattgaagatgataaacaacacgtcgtttttcaccgcgataacgcaagtgaaaagctaaatatcacgttgttgagccgcacgggtattttacccgaagccgatttctattgccctattccctacgagcccttacacatcgtcaccgatcaggcattaaatgctgagattcaaaaaggcgaagagggccttttggatcgggtatttagattgatagtagaggaaatcaagtttgctgatccagactggagtcaacgcatagccttagagagcctgaatgtcgattcctttgctcaagcctggtttgccgagcgcaaacaacgcgacccatttgactgggcagaaaaaaatctccaggaagtcgaacgcaataaacgagaaaaacatactgttccctggcgttatgtcattctgcgcctgcatgaagccgtacaggaaattgttccacatctgaatgaacacgaccataaacggttcagtaaaggccttgcccgggttttcatcgataattatgcggcaatccctagtgagtctattcgtcgcctacttgccttacgtgaagcgggaatcattcatattctcgccctcggtgaagactacaaaatggaaattaatgagagccgcaccgtcctgaaaacggaagacaacagctacagctttgacgtttttattgatgcccgcggacaacgtccgcttaaagtgaaagatatccctttccctgggctacgcgagcaattacagaaaacaggggatgaaatccctgatgttggcgaagattatacgttacagcaacccgaagatattcgtgggcgcgtagcgttcggcgcgttgccctggttgatgcacgaccagcctttcgttcagggacttacggcatgtgcagaaattggtgaggcgatggctcgggcggtcgtaaagcctgcatcccgtgctcgtcggcgtcttagctttgattaaaggtaaagctatcagcactcaacaaactgatgctgttcattaagacgatagcggactccggctcgaatattgttttcaccttcaatggcgacggcgaagcgaactctttcgccgtcatgatatgccagtgcggcgcttcctcctggcccgagaataatactgtcgaccacgcccgtgctcactaccgtactattttcaccgctggcaatgatgtgtacattgtcgccgctgttggcaattctggcgtttgcgccaaagctggcgatttgcaccaggtcaccattactggcgacatgacaccgttcacccaatgtacaaacgcgtactcgcattccggtattcgcaatccgactgctatctccagcgctgcttatccggctagaattaccggttacagcaacccgtgcgcgttcaccggagctgccaatgtgactgttaaagccgacacttccaatccgcacgctataacccatactggcaatttgcgcggcatacccagcggttgcgattctggcgttatcctcacaacagccgatgcgagcatgatcgtcgctgcgggcaaactgactgcaaaatggtctctctccggggtctgtggccagtttttgcatagaggaaacttcctgatgcgcgaagttttcatccgccagccattttttccacgcatactcaaccagactctccgcccagtccgtatatccttcctcaatcagtgcatgatgaatatcggcataactaccgccgcgtgggaaatggcgcaggaaccagcgatacatcaccgctccgatacgccattctcgcaggtctgcttgtgtaatgatcattcgttagtgccggtgatagccatcgaccatgcttttaaaggtttcgtgtggcgtacgccccgtggtgcaaagataaagatgaccgaagataaaaaagaggcttataaatgccagagcaaaatgtgtctgcaataaccagtatcttacgccaggaaacacatctcccacggcttgcggatagagacacagcagccccgtcaatagtaacaacggcagcaatccatacatgacaccaacataggcgacctgctgtaagggattaaatttagactgggttgttgccgggaaaggatgttcttccccctgcataatgccaaacaaataaaatcgcgtttgttttgccgctcgttccagccacccctgacgacgaatgcgatagtggtgaccattatccccaacggcattgatcagcacaaagccgagccagcatgccagtaacaaaaatccgcaaacttcatgcaccgcaaccagacttttaaccgcagttgcgcccaccatcgcaaagtgatttatcagcccactggccagcaacaatacaaagagtaacgcattgctccagtgccataatctgaccgctttgctgtaaagataaatcttctcaccatgatcggtggcacttttcttcacgccacgagcacgaagcaaggcatgcagccccagcaccaaccacatcccaaccagcaatactccggcaatgatcaaccacaccggccaaaattcgggagtgaactgtggcacatagttcgctaactggctctgaaactgttcagcatgttggctcgggttcatacattttcctttttaatcaaatgttgaccgaaccggcgatacagatgcggtttcccggcaccaggtagctgatattgatagtatttattttgctgcaaccacgcctgaatttctgggctatcttcgcgaccaaagatcaatgcgtgttccgggcaggcgctgacgcaaatgggcggaaagccttttgccagtcgggactcagcgcagaaatcacatttatctgccactttagtgacagggttaaggtagcgaacctggtacggacaagcgccaatgcaataactgcagccgatgcactggcttttttctacccgcacgatcccctgctcatcacgccagctcgcccccgtcgggcaaacgtcgatgcacggagcatcttcgcagtgctgacaactctggcgaaaaaagtgatactgcgtttcgttgtcgttatcggtgactggaatgtgtgctatgcttaaacggcttccctgagcggggacgtggttagttttacggcatgcgcgggcgcaaatattacagccattgcaccgactctcgtcatgaatcatggcataccgaacttccttttcttgcctcgtgttcgctaacagagaagacgcagaaccagtaaaaaagattactgttcccatccccagaacaaatttgcgtcgagtgaaggacatctgattatcccctaatgcagtggctgcaactgtccaccctatccatgacatctccctgaaatttcaggggttctgaaactgctctacctcgaaccattcgcataagccataagccttgccataggtcataaatcgctcgctaaacaagtacaacaccgccgtgctactctccacctgccgtatatcggcatattcaggtgcaacatccatcgcggcgatcgcggcttcaatctgcgcttcctggaagtaatatggcgcttgcatcagcatggcgactttgtaaggacgaggatacgtctggcactcaaaacgaacggcgtgtgcaatggcgcgacaaatgtcctgctccacaacttgcaaagacatcgccgcgtagttttcactcatggcctgcgtactgtaatagtaatcatccttgcttcccgtcaaacaagcgatatccgcgtagtctccgttctgcttaatgctttccagcaaaacactcagttcctcttctgcaaccaaatagggtgggctgagaaacacggcgcgcgccaccagctgcccagccgcagaatgctggcgaatgaactcagccaggatttcagcaggttctggttcggttaccgtatcaacggggtgacgcatcccctgcaaccattgccgcttcgcctcgtcaacttcgctgactttcgctaacggcaattcatcctgatggttcatcttacccattccttacgcaggcagtagattgtgtgctgccagatcggcggcaatatcttccagccccagacgctgcaatgtttcgcgggttggacaaccaagctgtgggtcccagcccatttctttgtagaacatcgtgaggctagcatgcatatcgtcacgatccattttgtcagtaccttcagtaaagaccgggatctgcggatccttgtcgaatacccaggaacagataagatcgtgttcattacgcatatctttggtttgcatcagttttaccgtgtaggcacgatgcaacgtaaaaatacgctctgcagctaaatctaatttttcctgagtcatctcttcgccggtgatcgctttgaagaatttggcttcaagcgccagatcgccccggtaattacggcttttcagcgggctaacggtcattggccagacccagttgcacagggtgacggcgttatgcaaacagacccgcaacaggctccactttgcatatttaatttttgcgtcattgattggcgtgtagtttttggtttcatcgtaagcatcttcagaaccaaaaagttctttcgccacttcacgttgcagtttcaatggcaagccggaaccaataaagttgatatgggtatgcgtcatgcagtcacggttgaacatacagttaacaatggaaccgacctgcgcactcgcttcattggcatggtgaaccggatagccaaacgggctccagagtttatttttcgcgtagccccagtactcttcacccaaattccagcgttctgcgatggcataactaccatcagccaggtgactcagctcacccacacgatgcgccagacggtagtaaaaatctttaatgaagttaacgtcacccgcttccagttgatcccagcgaatttctgcatactcttcagctggcagaacacgcttgaacacacctttgctgtaacaataagtaaagtcgcgatgcaactgcccgtagttacaccataggccgtagtcatcgaacaaattcagacccaccaggttaccaatcacacgaccatcgtctttatcttcaaaatctttcggcccgttcgggaagatggtggtatggacaaagtttgctacacaagtgttaccacctgtgctgggcacgccaaactctttcacccgaggaatattcatttgggtcatacaacggatcgggcaagagtggcagccgctcatttttactgtgtatttctctgccgccggtcctaagtcaaaaacggatttataggtacgaaagccgaccgtattctgattgcctggcggaatttcacccgtttcaatcggaccaccttcagccgcgccccaaaacagccctttacgtgctgtccagcgactcttgggatcactatactctgcccagctttgtggcgtacttggcacgacatggttgttattcgcaccaataagttcagtcatcatgtaatcattgagacgcttcatctcctgacgatcggcaatgttgacccctttcgtcccttcaaccgcaatcgctttcaggtttttgctacccattattgcgccagttcccgcaccgccgctgtggttacggctattcaacatgccagagagaggaacaaggttttccccagcctgaccaatagccgccacacaggtttccggactggtcaatcgacaaatttcttccgtcgttgcgcgcgtcccttttccccataagaaatcggctttttccaggctaactttgtcatctttaatcttcagccataccggacttttcgccttcccttcgataataatgacgtcgtatccagcgaatttcatttgcgctgcaaaaaagccacccatatgggcatcgacgactaaatttcctttggtaaaagtagaaagactggtgatatttacgcgagaactacagggggcaccagatccagttaatgggccggtagcaaagactaatttattcgcttcatcgaaaggtttcgtgcctggcggtacttcgtcatacataattttgtagccgaagcccatgccaccgacaaaacttttaaacttactggaatcttcgagggtaatatttcctgtcgtgagattgactcttaatatattacctgtccaaccgttagccatgattttttcctttgcaagattcacacagtaatatctttccactcgataatttttaacgcccctgttgggcaggcgtttgcgcattcaccgcataacacacatttgctggattttttactttcggtatttacggtggccatcatccacgggcatgccgtagtacaggcgctacagccaatacagcgtttatgatcgacggtaatacagccttctttctgctgccaggtaatcgcaccaatcgggcagacgttcatgcattgcggctctttgcattgacggcaggtgtccgcggtatagttgagatcgccatacaggccgccgccagagccaaccccgttgtcgccaaagaaataattgcgatggattttgatacgggagaagaatgtccctacactgccatcgttgaagttggtacaagagatttcacagcggtggcaacccgtgcatcgcgctcgctgggtcaccagcacccctttgggggtatttatcaaccctactgtgccgctatcaatatcttcctgtttgcaacccaaaagactcagtaacgcaggggcaattgttagaccagcaaggccttttccacttatacgcaagaattctaatcgcgttaagccaatatctaatagtggacgatcaaccgggttcatttatttcgcatcctcttcgcaaacacagtgctgacaattcagcagcctgatattaagcattcaactaatacgctgctgactctgtccccaacaccagatattttccctaacccgatagtgtatgagaaaagattaacgccgataaactaatcctttatggttaggagaaaaaataatgtgattattctgagcccttaacattgatcgttatcaattaaaattacaaagcaagaaattataagtgaactgatatttattatcatttgaaataaatttaacttaagcgacaattatttgtgactttcattgcagaaaataaaaataacattatcgctataaattaaaatacataccgaaattcgtataatttcagcagttgttatttagaatgattaactggaccgcaactgaagcaagaatatcaggatgaagcttaccgcctcatcctgaatggtcattttaccagtgcgttaatgacggtttccatcgcctgcttttccagctcactgcgctgaatgcgtttattggctaatgctgtacgtaatacgcctgcgataacaatatgctttggttcctgccccagatcgcgcatttccagcacaactttaccgacaactctgcacatttctcggtacagttcatcctcttttgtccgatttcccattctttatacctatttatcatgccaactatcagcatatatcaatctaaccaattaaacaaaaatcaaacaaaatcagacaaataacgcgataaattattttaactgtagcaattgagcgatgatatatttatacaccggatgaactttcacttatcctcacactgacaacttcggcaccagacgttgcgcaaacagtgaagtttttgcgtaaccttttccctggaacgttaaatctttgataacaatttattgtctaacaagttgtatattttttgaaacgctgtttttgttttccttttggattaatttcagcgtataatgcgcgccaattgactcttgaatggtttcagcactttggactgtagaactcaacgactcaaaaacaggcactcacgttgggctgagacacaagcacacattcctctgcacgctttttcgatgtcacctatccttagagcgaggcaccaccactttcgtaataccggattcgctttccggcagtgcgcccagaaagcaagtttctcccatccttctcaacttaaagactaagactgtcatgaaaaagaccaaaattgtttgcaccatcggaccgaaaaccgaatctgaagagatgttagctaaaatgctggacgctggcatgaacgttatgcgtctgaacttctctcatggtgactatgcagaacacggtcagcgcattcagaatctgcgcaacgtgatgagcaaaactggtaaaaccgccgctatcctgcttgataccaaaggtccggaaatccgcaccatgaaactggaaggcggtaacgacgtttctctgaaagctggtcagacctttactttcaccactgataaatctgttatcggcaacagcgaaatggttgcggtaacgtatgaaggtttcactactgacctgtctgttggcaacaccgtactggttgacgatggtctgatcggtatggaagttaccgccattgaaggtaacaaagttatctgtaaagtgctgaacaacggtgacctgggcgaaaacaaaggtgtgaacctgcctggcgtttccattgctctgccagcactggctgaaaaagacaaacaggacctgatctttggttgcgaacaaggcgtagactttgttgctgcttcctttattcgtaagcgttctgacgttatcgaaatccgtgagcacctgaaagcgcacggcggcgaaaacatccacatcatctccaaaatcgaaaaccaggaaggcctcaacaacttcgacgaaatcctcgaagcctctgacggcatcatggttgcgcgtggcgacctgggtgtagaaatcccggtagaagaagttatcttcgcccagaagatgatgatcgaaaaatgtatccgtgcacgtaaagtcgttatcactgcgacccagatgctggattccatgatcaaaaacccacgcccgactcgcgcagaagccggtgacgttgcaaacgccatcctcgacggtactgacgcagtgatgctgtctggtgaatccgcaaaaggtaaatacccgctggaagcggtttctatcatggcgaccatctgcgaacgtaccgaccgcgtgatgaacagccgtctcgagttcaacaatgacaaccgtaaactgcgcattaccgaagcggtatgccgtggtgccgttgaaactgctgaaaaactggatgctccgctgatcgtggttgctactcagggcggtaaatctgctcgcgcagtacgtaaatacttcccggatgccaccatcctggcactgaccaccaacgaaaaaacggctcatcagttggtactgagcaaaggcgttgtgccgcagcttgttaaagagatcacttctactgatgatttctaccgtctgggtaaagaactggctctgcagagcggtctggcacacaaaggtgacgttgtagttatggtttctggtgcactggtaccgagcggcactactaacaccgcatctgttcacgtcctgtaatattgcttttgtgaattaatttgtatatcgaagcgccctgatgggcgctttttttatttaatcgataaccagaagcaataaaaaatcaaatcggatttcactatataatctcactttatctaagatgaatccgatggaagcatcctgttttctctcaatttttttatctaaaacccagcgttcgatgcttctttgagcgaacgatcaaaaataagtgccttcccatcaaaaaaatattctcaacataaaaaactttgtgtaatacttgtaacgctacatggagattaactcaatctagagggtattaataatgaaagctactaaactggtactgggcgcggtaatcctgggttctactctgctggcaggttgctccagcaacgctaaaatcgatcagctgtcttctgacgttcagactctgaacgctaaagttgaccagctgagcaacgacgtgaacgcaatgcgttccgacgttcaggctgctaaagatgacgcagctcgtgctaaccagcgtctggacaacatggctactaaataccgcaagtaatagtacctgtgaagtgaaaaatggcgcacattgtgcgccattttttttgtctgccgtttaccgttactgcgtcacgcgtaacatattcccttgctctggttcaccattctgcgcactctctacactaggcgcattgctggctgcgggagttgctccactgctcacgctaaccggataccctgcccgacgatacaacgctttatcgactaacttctgatctacagccttattgtctttaaattgcgtaaagcctgctggcagtgtgtatggcattgtctgaacgttctgctgttcttctgcgcttagtggtcgatgtacttcaacataacgcatcccgttaggctccacggaatatttcaccggttcgttgatcactttcaccggcgttcccgtccgcacgctggagaacaaggctttaatatccggtgcattcatgcgaatacacccactactgacgcgcaaaccgacgctgtccggcgcactggtaccatgaatgaggtattcgccattaccatgcgcgaggcgcagtgcgtaacgtcctagcgggttatttggtccggcaggaacgactggcggtaatttaatgccacgctccaggctacgctgacgaatgcctgccgtaggcgtccaggttgggttagggattttctgcccaacacgcgtttccatcaccggcgtttccagcccctgcaatccaatacctattggataaacctgcacaatattttctcccggcggataataataaaggcgcagctctgcaaggttaacgataatcccctgacgcggtgcatcaggtaataacagttgactaggaatagttatcgtcgtaccaggttttggcaccggggcgatagtgttattggcttcaaggatcaacattgccgcagtatcaaaacgtcgggcaatagcctgaaggtttttatccccttcttgcaccgtatacgtttgattttgcccaaccagtcggcttccggttggtggtagcggataatcaaccgcccaggcagcctggatggcgctaaaagcgccgataagcgtgagtgtaagcaaagacgcgcgtttcattgtaaacctcctgtatttgccggagactcacgctgaaacgtcggatggcgcttatgttcacctgaaaccaaaacactcctgtgcaggtcagtgtaaacattgaccatccggcaatgtgagccaaccggatgaaagctgtccttttagtttagctaagtgcagcggctttggcgcgaattgcgcgaatcatcgcttccagaccttgactacgagatggggtgagatgttgggtgagcgccattttttcaaaccacggacgcacatcgaaattgacaatatcctgcggcgtcatctgatcgtagagaataaagacgaccgcaataagccctttcacaatcgccgcatcgctgtcgccctgtaattcaataattccctgggcattctggcgcatgacaatccacacctgactctgacagccctgaatgctattttgtggacttctgtcttcgtcgcgtaattctggcagacgctggcccagctcaataatgtagagatatttctcttcccagttggcgcagcgtaaaaaattacgcagcaacttttctttatccggcaataaagccatagtgcctccctgttatcccagcaaacggtgaatacgttgcaggccggtcaccagacgatccacttcttcatgggtgttatacatggccaggctcgcccgacacatcgcagggacgttgtaataggccatcaatggcattgcgcagtgatgtccggtacgcacagcaatgccgtaattatcgagaaaactgccaacatcataggcgtggtgtttaccgagattaaaagcaataacgccaagcctgttttgtgggccatagagagtgagatccggtacagattccagctgacttagcgcataatgcatcagattctgttcatactcggctatgttattaagccccagcgcgctaacatactccagcgccgcgccaagaccaatgatgcccccggtattgggtgtaccggcttcaaaccgccatggtgctttggtccaggtagtgccttcactcaggctgacggtggcgatcatagaaccgcccccttcccacggcggcatctcctgcaacaaggcttctttcacataaagaatgccaattccggtggggccatacagtttatgcccggagaacacgtaaaagtcgcaatccagcgcctgaacatccaccggatgatgcatcaccgcctgagcgccatccaccagcacttttgcgccatgctggtgcgcaagcgtgatcatttccgccagtggattttctgtgccaagcacgttggagacatgagtaattgccagcaggcgagttttctcatcaaacagcgtaggcagcgtctccagttgcaacgtaccatcgggattgagcgggatcacacgcagctctgcgccaacgcgtgcgcaaagcatctgccagggaacaatgttagcgtggtgctccatctgactgatgatgatgttatcgcccgcccgcacgttgctgttgccccagctattggcgaccagattgatcccttccgtcgtgccgcggacgaacaccagctcttccgcgctacgggcattaataaacaggcttgcccgcttgcgcacgttctccattttctcggtcgcctgggcgcttaaggtatgaataccacgatgcaccgccgcgtagccatgacgataaaactcggcctcggcgtcaatcacctggctcggtttctgcgcactggcggcgctgtcgagataagccagcggcaaaccgtttacctcacggctaagcaccggaaagtcggcccgcactttgtcgacggaaaaaatcatcttgcacctcctggcagccgttgaccgattcgggccagcacctgctgtttaagcccctcatcacgcagtgcttccgtcagttcggcagcgaaggcgtaaatgatcatctgctgggcatcctgctgattgatcccgcggctgcgcagatagaatatctgttcatcatcaatacgccccaccgtcgcgccgtggctgcatttcacatcatctgcatagatttccagctgcggtttcgtatccacttccgccagtttgcccatcagcagattgttgttggtcatctgaccatccgttttgatggcgtgctgcgcgacgttgatcaaaccgttaaataccgcgcggcctttgtcgctgacgatagttttgtgcaactgtcggctgttacaaaaacctttattgtgttccagccaggtacgggtatcacacacctcgtttttcaccggcatcgccaggctattgatccgcagcgtgctgttttcgccattgagttgcgtactggtgttgtgtcgtaacactgcgccacccagcaggaaactgtggctaaatgcggtggcatcctcagccagcaacaaatcgttatgagcaaagtggtgactgagcgggttttcaaacgccagcttgatatgctgcaagtgggcattcgctgcgacgttgatagtgaaccgtgccccggtaaaatgacgagcatcattcaggctgacaaaatgttcgatcaccgttgcttcggcaccttccgccagatccagatgatgtcggtaatgggcagtgttcacctcttcacctgccacgccctgggtgatatgcattaacagcaatggctttgccggccgttgaccgcgcttcacggcgatatgcgtcacgctttgtgccaggctttccgtcaaatgcagaaacacttccgcctgaatagcgtcgggtaaaccctgacggtcgtcgttaatgctcacttcatatccgctgccttcagttgcatcgctcagtgcgggcacgtaacgcccatcgacaaacaccagccgcacggagtctaacgttaacgctaaggcatcacgctgctgtggggatatctctcccgcaatgctgacaaactggctattgatcagcccttccagcggcgtatatttccagttttcatgtttacgtgtcggcagtccggtacgcagcaattgttgtaaatgctgctgtgcttgcggggagcgttttgtcccttcagcttcaaacaagtgatgccactgttgcagcgcgttactgctgttcggtaagccagccataaccctgctcctccagttgtttgaccaacgtgaaatcgccggatttcacaattcgtccctgatatagcacatgaacgtaatcaggcttgatgtagtcgagaatgcgttggtagtgcgtaacaatgatgaaactgcgcttgccatcacgcaggctgttcacgccatcggcgaccacttttaatgcgtcaatatccagcccggagtcgctctcatcaagaatgcataactccggttccagcaccgccatttgcaaaatatcgttgcgctttttctcgccgccggaaaaaccaacgtttacgctacgggttaataaatcttccggcatcttcaggagagcgattttctcttccatcaaatcctgaaaatcaaagcggtcgagcgtttcctggccgcgatagctgcgcaccgcattaagtgccgtttgcaggaaaaactggttactgacacctggaatctccaccggatactggaaggccataaagatgccttcgcccgcgcgatcttccgggctcagcgcaagcaaatctttgcctttgaactcaaccgtgccgcccgtcacttcataatcttctcgcccggcaagcgttgcgcttaaggtacttttgccgctaccgtttggccccataatggcgtgaacttcgccgggatgaacgtcgaggcttaatccgcgcaggatagctttatcttccacgctgacgtgtaaatctttaatacttaacatgtttattccttatccgacgctgtgttcaagactgatggcgaggagtttttgtgcttcaacggcaaattccaacggcagctcgctgaacacgtctttgcagaaaccgttaacaatcatgctgatggcgtcttcttcgctgatcccgcgttgcaggcagtaaaacagttgatcttcaccaatacgacttgtcgttgcctcgtgttccagttgcgcactattgttacgacactcaacatacgggaaggtatgcgccccacaattagcgccaatcagcatactgtcgcactgagtgaaattgcgcgcattggttgccgtcggcatgattttcactaagccgcgataactgttctgactatgtccggcagagatccctttgctgataatggtgcttttggtgtttttaccgatgtggatcatcttggtgccggtatccgcttgctgatgaccgctggtcagcgccacactgtaaaactcaccaatggagttatcgccgcgcaaaatgcagctgggatatttccacgtaatcgcactcccggtttcactttgcgtccaactcattttgctgttttcgccttcgcacaaagcacgcttggtgacgaagttgagaataccgccggtgttgttatcgccaggaaaccagttttgtaccgtggaatatttcacctcggcgtttttatggatgatgacttccaccactgccgcgtgtaactgatagctgtcacgcaccggagcggaacagccttcaatgtagctgacgtagctgtcttcgtcggccaccagaatggtgcgctcaaactgcccggttttttctgcgttaatgcgaaaataggtggaaagttccatcgggcagcgcacgcctttaggcacataaataaacgtaccatcagaggctaccgccgcattaagcgcggcaaagaagttgtcattccccggcaccacggtgccgagatatttacgcaccagttccgggtgatcgtggatcgcctcaccaaaggaacagaaaataattccctgctccgccagtttttcgcgataagtagtggcaacgctaacactgtcgaaaatggcatccaccgccacctctttgccttcccgcacgggaacgcccaactgctcaaacgccgcctccacctctttacttaaaaaggcgttcgcgccagtttgctgcaccgcgccaggttcagacgcgcaagtgtcgtcacaattaccgcagcttggtgcactgtagtagctgtaatcctgataattcagcttgtcgtagtgcgctttcaaccagtgcggttcttccatctccagccatgcgcgataggcgtttagacgaaactccagcatccactccggctcattacgcttcgcgctaattgcgcgcaccacctcttcgtttatcccctttgccagctcatcggtggctaactgggtgaagaatccttctttataattcagcgggccgccggtccaggttttgacatcgtcagttgcttcagtattacgagacatagtaccgcttataccccaaagctttcgccacagccacattcattctgggctttagggttgtgaaatttgaatatctgattaagtccttcacgaacgaaatcgacttccgtgccatcaataaacggcatcgcttgcagcgggacaaacagcttcgcgccgtcgtgttcaaacagcagatcgtctttgtccggctcgctaacactgtcgagcacatagccaaagcccgcgcagcccgtttgcttcacgcctaagcgcacgccgaccatacccggctgctttgccaccagctcacggatgtgtatcgccgctgcgggtgtcagcgttaagccttgccaggcgaaatcttgtgggttaaaggttccactatgcatgtccatcgatttacctcacttcatcgctttcagcgtataacagcatgttagtgataatgattatcagttcaacccagcaaacgcaggggctttaccgtaaaacatgctttttgcctgcttttaataagcatagaccctgatgtgtgggttaacaggcacgctaagaattaggtatctcattgttagataatggttattatctaaggagcattaaggctgtgatgaaaaagaaaaagttgtattgaaaatgactatttaagagataggtaaaaaagtgcagcgttcagaaataagaaaacccttaagtctgtgcgacacaggcttaagggtttctaccccatccggcgcttatctccggcactctcagtggcttagctcttgaaggggcgataagaataatctcataaagctaacccgccgttttaacacaaactgcgattagtattatttttgaacaatatcaggcggtagataagcagtattaagaaggtcatcgaacctggacggaggttaatccaggtcgatttggcgaacttgcggcattaagtcaggatcaatgcacgcccagacgccaggcaaagtagatttcttcttttaattcagcagaagagagagtaagcaggtcagcaaattcaagttctagttgtttcagacgtttgagatattgggcaggactaagattgctctggtcacggcgtaaaaattcaatggccagctgggtgggatcaagttgagtagacatagcatcctcgcttttagacaagacctgcacagtataccaccgtttactgtgcagataatgaccaaaagcaatatgcgtcacacttttctggtgacaacgtcacaaaatggcggtcgtcaatcgactgctacagcacaaacgccctttctcatcgaagatttcaatctgccagacctggtgacggctaccgagatgcaacggtttgcatacgccgcgcacccgcccttctcgtgcgctgcggacgtggttagcattgatttccagaccaaccactttttgctcaccttcggtacataaataaccggcaacggaaccgatactttcggccagtaccacggatgctcctccatgcagcaacccgaaaggctgctttgtccggctgtctactggcattgtcgcttcaagggtgtcatcaccaatatgttcaaagcgaatatccaggaaccccaccatgtttccttcacccatagcattcagtgcttccagggtgattttccgtttccatatcatttaataatctccagtaaagcctgcacaggatggcgtacccccgtgccttcaacccgttttacctggctacggcaggaatatccggtcgccagacagcggttacgcggcagtcgctgcatagcctgatgccaggataactcatagatcccgaggctattttcatggtttttcgcttcatgtccgtaagtccctgccatgccgcagcaacccacgctgacattttccagtttcgcgccaaaacgggcaaatatcgcggcccattgtgctggcgcacccggcaaggcggtaacttcggtacagtgaccaaagaaataccaactttcaccgctgactgtagccactggctgactctcaagtgcgcttgccagccattcattcgccagtaagacgttaaactcgccacgctcctcgcccagcgccagtttatattcatcgcgataacaaagtaccagcgccggatcgacgcccaccattggcatacccagcttcgccatacggttgaggaaatccgccgtctttttcgccgtcttcgcaaaacgattaagaaaacctttaatatgctgggctttgccatttgggctaaatggcagtaacacaggctggaaacctaatttttcgaccagacggacaaaatccgccaccacttgcgcatcgtaatagctggtaaaggggtcctgcaccaccaacactgtgcgcgctttctgctctgcattgagagattcaagctgttccagcgtcatgtttgcgctgcgatgccccaccatttgttgttgtaggctggggacgctcagcagcggcaaatcaaccatgccgatatgtttttcgctgagtttgcgcaccagcggctggttaatgaagaagttaaaggttttcggcgcgcgtgccatcagcggcgcgtagctctcgaccgtagcgacgaggtggtcgcgcagcgggcgtaaataacgggtgtgatagagctgcagaaaacgagagcgaaactccggcacatcaattttgatggggcactgggtgctacacgctttacaggccagacagccgctcatcgcctctttgacttcgtgactgaagtcatattcgcctttattcgcatgccagctattgcgcgtgcgggcaattaacgtccgcaaactgacgccggattcaggcagttcttgttccagtttgagtggatcaacgccgcgatccgccaacaaacgcagccattcacgcaccagcgttgcgcgccctttcggactatgaatccggttctgggtgatcttcatgctcggacacatcggactacgggcatcaaagttgaagcataaaccgttgccgttacactccatcgcaccgcgccactgctggcgtaccgcaatggggatctgccgatcgaatgtaccgcgcttcaccgcgtccactttcatcatcggcgcatcgagaccttctggcgggcaaatcttccctgggttgagtcggttatgcgggtcaaatgccgctttcactttgcgcagttctgcaaaaagttcctcaccgaaaaacgccgggctgtattcagcgcgaaaacctttgccgtgctcgccccacaacaaaccaccgtatttcgcagtcagcgccaccacgtcatcagagatttgcttcatcaaaatctcttgttgaggatcgcacatatccagcgctggacggacgtgcaagacacctgcgtcgacgtgaccgaacataccgtagcttaagccgtggctgtcgagcagcgcgcgaaattcagcaatataatccgccaggtgttccggcggtacgcaggtatcctcagcaaacggaattggcttagcggcacctttggcattgccaagcagaccaacggcttttttgcgcattgcatagatacgttcaacccccgccagctcacggcacacctgccagccgatgacacctgcttgatgactggcgatcagctcatccaaccgcgcacagagtgcatttacccgctcatcaatcagcgcctcatcatcaccagcaaattccacaatgttcagcccgagcatctcttggtcaggcacatcggtaatcaactcgctgacggaatgccagacaatatcttcccgcgccagattcagcactttactgtccaccgtctctacgctaagcgcccgcgcctcaaccataaacggcgcgttacgcagcgcagagtcaaaagagtcatatttgacgttcaccagacggcgcactttaggcaagcgtgtaatatccagccgcgcttcggtaataaaggccagcgtcccttcactacccgtcagaatgcgcgtcaggtcgaactcggtcatctcatcgttaaagacatgacgcagatcgtaaccggtaagaaagcggttaagtttggggaagttgtcgataattaactggcgttgctgacggcaacgttgataaaccgtgttataaattcgcccgattgtggtattggatttacccagcgtttccgccaattcgacgggtaaaggttgcgtatcgagaatatcgccccccaacaacaccgcgcgtacgccaagtacgtgatcactcgttttgccatagaccaggcttccctgaccggatgcatcggtattgatcatcccaccgagcgttgcccggttgctggtgctaagttccggcgcaaaaaagtagccgaacggtttcaggtactgattgagttgatcttttatcaccccggcctcaacgcgcacccagccctcttcagggttaatttcgatgatgcggttcatatggcgggacatatcaacaataatcccctggttgagcgcctgaccgttagtgccggtgccgccgccgcggggggtaaagatcaggctactatagcgttcctgcgcggcaagacgggcgatcagcgccacatctgcggtactacgcggaaataccaccgcatcggggagaagttggtaaatactgttgtcggtgctcattgtcagacgatcggcataacttgtcgccgtatcgccggtaaaaccttgttgctccagctcttgcaaaaaattaagcaccagttgaacgacgccgggtgcctgggaaatctgtggaatcattatattgaccctttcctgcggtctgtgatgtaggtcgatacactattctttcaggctgctgcaatagcgcactgaaaggtgatgtttgtttactctatggatttcgtgttgcaggaaggcggcaagcgagtgaactccaggagcttacaatagtaagtgactggggtgaacgaacgtagccgcagcacatgcaacttgaaatacgacgagtaaatcgtttgcgtgttgcctgagttgttgtaccacatttttttctaacacgcccatcagaattaagggcagaatcggcctgttaaaaaccgctgaaattgctcatcattatgcaggtgagtttcgcgtgttcacgtcgcgtcgacgatttgacgcacaaaaaaggtgaaaagtagttatggtaaatgttcgtcagcccagggatgtcgcacaaattctgcttagcgtgctgtttttagccatcatgattgtggcatgtctgtggattgttcaaccctttattctcggctttgcatgggccggtacggtggttatcgccacctggccggtattgttacgtttgcaaaagatcatgtttggccgccgctctctcgccgttctggtgatgacgctgttattagtgatggtgtttatcatccctattgctttgctggttaacagtatcgtcgacggcagcggcccgctaattaaagccatttccagcggtgacatgacgttacccgatctggcgtggcttaataccattccggtgattggcgcgaagctgtatgcaggctggcacaacttgctggatatgggggggacggcgatcatggcgaaagtccgcccttatattggcaccaccaccacctggttcgttgggcaggcggcgcatatcgggcgctttatggtgcattgtgcgctgatgcttctcttcagtgccctgctgtactggcgcggtgaacaggtggcacaaggcattcgccattttgcaacccgtctggcaggcgttcgcggagatgccgccgtgctgctggcggcacaggctatccgcgcggtggcgctgggtgtggtggtgacggcgttagtacaggcagtgcttggcggtatcggcctcgccgtatccggcgtaccttatgcaacgttgctaacggtgttaatgatcctctcctgccttgtccagcttggcccgttgccggtactgattccggcgattatctggctctactggactggcgataccacctggggaacggtattgttagtgtggagcggtgtggttggcacgctggataacgtcatccgcccaatgttaattcgcatgggtgccgatttaccgctgatcctgattctctctggcgttattggtggtttgattgctttcgggatgatcggtctgtttattggtccggttctgttagccgtttcctggcgtctgtttgccgcgtgggtggaagaagtcccgccgccgacggaccaaccggaagaaattctcgaagaacttggcgaaatcgagaaaccgaataagtaatttctcatcaggcggctctgccgcctgattgttaaccaccgctaattgatatttgcttgctcttccccatattttcctgcttaccgccattcagctggtagtacctgtcgcaaattctttacagtttttaaactaatgagacgaatctgatcgacgcaaaaagtccgtatgcctactattagctcacggttataaatcaacatattgatttataagcatggaaatcccctgagtgaaacaacgaattgctgtgtgtagtctttgcccatctcccacgatgggcttttttttaacatttttccgcttcgctacctcgcccctcactctttccaataatgttgcacaagatactgtgactctcttcaagccgtcagcaggctgataatgttatttatattttattgtttatttcatgcagccattacacgatgaacgcttatgaactccaggcactccgccatatttttgccatgactattgatgaatgcgcgacctggattgcccagaccggtgacagtgaaagctggcgtcagtgggaaaatggcaagtgtgccattcctgatcgtgtagtcgagcaactgttggctatgcgtcagcaaagaaaaaaacatcttcatgccatcatagagaaaataaataaccgcatcggcaacaacaccatgcgttttttccccgacttaaccgcatttcaacgagtctaccctgatggcaattttattgactggaagatctatcaaagcgtagctgctgaattatatgcacacgatctggagcggctttgttaatttttccacagaaaggaattgtcgttgttacaacaataatgaacggatgctgacacaacatcgcttcactttttaaagcacctttgctaagtagaacctatgaaaaatccctatttccctaccgcacttgggttgtattttaattacctggtgcatggtatgggcgtccttttgatgagcctgaatatggccagcctggagacactttggcagactaatgccgcgggtgtcagcatagttatcagtagcctgggcattggtcgattaagtgtcttgctttttgcaggattattatccgatcgctttggtcgccgcccttttatcatgctcgggatgtgctgctatatggccttcttttttggcatcctgcagaccaataacatcattatcgcttatgtttttggctttctggcgggaatggcaaacagttttctcgatgcaggcacttatcccagtttgatggaagcttttccacgcagtcctgggacagccaatattttaattaaagcatttgtttccagcggacaatttttattaccgctaatcattagcctgttagtgtgggctgaactgtggttcggttggtcctttatgattgctgcaggcattatgtttattaacgctctgtttttataccgttgtacgttcccaccccatccgggtcgtcgcttacctgtcataaagaaaaccaccagctctacggaacatcgctgtagtattatcgatttagccagttataccttatatggctatatcagtatggcaacgttttatctggttagccagtggctggcacagtacggacaatttgttgcaggcatgagttacactatgagcatcaaactactcagtatctacaccgtgggtagcctgctttgtgtatttattaccgctccactcattcgtaataccgttcgcccaacaacattactgatgctgtacacctttatcagttttattgctctgtttaccgtctgcctgcatcccacattttatgtggtgataatatttgcttttgtcattggttttacctctgctggaggtgttgtgcaaattggcctgacgttaatggctgaacgtttcccttacgctaaaggtaaagctacagggatctattacagtgcgggcagtattgcgacctttactattccgttgattacggctcatctgtcccaaagaagtattgccgatattatgtggttcgataccgccatcgctgccatcggttttttactggcactgtttatcggcttacgcagccgcaaaaaaacgcggcatcacagcctaaaggaaaatgtcgctccgggtgggtaatgcaatattcttttcaggtcatgcaagatcttacggataaataactctttctgcgctaactaaggaaaatcgcgatcaaaaacaaactatgacatgcaatattcctggaaacataaactttatgccatgtacccagggaaaatcatcttcagtatagtaattatgtaaaccgtcggagaacaatacgtacggtaacgaaattatctttcagcaaggagctgtgaaaatgtctcaaaataaggctttcagcacgccatttatcctggctgttctttgtatttacttcagctacttcctgcacggcattagtgttattacgcttgcccaaaatatgagttctctggcggaaaagttttccactgacaacgcgggcattgcctacttaatttccggtatcggtttggggcgattgatcagtattttattcttcggtgtgatctccgataagtttggtcgtcgggcggtgatattaatggcagtaataatgtatctgctattcttctttggtattcccgcttgcccgaatttaactctcgcctacggtctggcagtgtgcgtaggtatcgctaacagtgcgctggatacgggtggctaccccgcgctcatggaatgctttccgaaagcctctggtagcgcggtcatactggttaaagcgatggtgagttttgggcaaatgttctacccaatgctggtgagctatatgttgctcaataatatctggtacggctatgggctgattattccgggtattctatttgtactgatcacgctgatgctgttgaaaagcaaattccccagccagttggtgggcgccagcgtaactaatgaattaccgcaaatgaacagcaaaccgttagtctggctggaaggtgttagtagcgtactgttcggtgtagccgcattcagcaccttttatgtgattgtggtgtggatgcccaaatatgcgatggcttttgctggtatgagtgaagctgaggcattaaaaaccatctcttattacagtatgggcagcttggtctgtgtctttatttttgccgcactactgaaaaaaatggtccggcccatctgggctaatgtatttaactctgcactggcaacaataacagcagccattatctacctgtacccttctccactggtgtgcaatgccggagcctttgttatcggtttcagtgcagctggcggcattttacagctcggcgttagcgtcatgagtgagttttttcccaaaagcaaagccaaagtcaccagtatttatatgatgatgggtggactggctaactttgttattccactgattaccggttatctgagcaacatcggcctgcaatatatcattgttctcgattttactttcgcgctgctggccctgattaccgcaattattgtttttatccgctattaccgcgttttcattattcctgaaaatgatgtgcggtttggcgagcgtaaattttgcacccggttaaacacaattaagcatagaggttaaaggagttaattatggatgttaccgcaaaatacgaattgattgggttgatggcctatcctatccgccacagtttaagccccgaaatgcagaataaagccttagaaaaagcgggattgccatttacctatatggccttcgaagtggataacgatagctttcctggagcaattgaaggattaaaagccctcaaaatgcgcggaactggtgtaagcatgccgaacaaacaactggcgtgtgaatatgttgatgaattaacaccagctgccaaactggtgggggccatcaacaccatcgttaatgatgatggctatctgcgtggctataacaccgacggcacgggccatattcgcgccattaaagagagcggttttgatatcaaaggcaaaacgatggtgctgttaggggccggtggtgccagtacggcaattggcgcgcagggggcaattgaaggtttaaaagaaattaaactctttaaccgtcgggatgagttcttcgataaagccctcgccttcgcgcagcgggttaatgaaaacaccgattgtgtcgtcacggtcaccgatctcgccgatcagcaagcctttgctgaagccctggcttccgccgacattttaaccaatggcacaaaagtgggtatgaaaccccttgagaatgaaagtttggttaatgatatcagtctgttacatccgggacttctggtcactgaatgcgtgtataacccgcatatgacgaagttattgcagcaggcgcaacaagctggttgcaaaacgattgatggatacggcatgttgttgtggcaaggggctgaacagttcacattatggactggcaaagatttccctctggaatatgttaaacaggtcatggggttcggtgcctgacaggctgaccgcgtgcagaaagggtaaaaaatgaaaaccgtaactgtaaaagatctcgtcattggtacgggcgcacctaaaatcatcgtcagcctgatggcgaaagatatcgccagcgtgaaatccgaagctctcgcctatcgtgaagcggactttgatattctggaatggcgtgtggaccactatgccgacctctccaatgtggagtctgtcatggcggcagcaaaaattctccgtgagaccatgccagaaaaaccgctgctgtttaccttccgcagtgccaaagaaggcggcgagcaggcgatttccaccgaggcttatattgcactcaatcgtgcagccatcgacagcggcctggttgatatgatcgatctggagttatttaccggtgatgatcaggttaaagaaaccgtcgcctacgcccacgcgcatgatgtgaaagtagtcatgtccaaccatgacttccataaaacgccggaagccgaagaaatcattgcccgtctgcgcaaaatgcaatccttcgacgccgatattcctaagattgcgctgatgccgcaaagtaccagcgatgtgctgacgttgcttgccgcgaccctggagatgcaggagcagtatgccgatcgtccaattatcacgatgagcatggcaaaaactggcgtaatttctcgtctggctggtgaagtatttggcagcgcggcaacttttggtgcggtaaaaaaagcgtctgcgccagggcaaatcagcgtaaatgatttgcgcacggtattaactattttacaccaggcataagcaataatatttcggcgggaacaccctccccgccgaactaaaaaatatattcaatcgtatttaataaaaatatttcgtgagtctctgtgcgctaattctccatttggcgtagggaaaatcacatctgaatcaggaattaacaatgaaacctgtaaaaccacctcgtattaatggacgagtgccggtcctgagcgcacaggaagcggtgaattatattcccgacgaagcaacactttgtgtgttaggcgctggcggcggtattctggaagccaccacgttaattactgctcttgctgataaatataaacagactcaaacaccacgtaatttaagcattattagtccaacagggcttggcgatcgcgccgaccgtggtattagtcctctggcgcaagaaggtctggtgaaatgggcattatgtggtcactggggacaaagcccgcgtatttctgaactcgcagaacaaaataaaattattgcttataactacccacaaggtgtacttacacaaaccttacgcgccgccgcagcccaccagcctggtattattagtgatattggcatcgggacatttgtcgatccacgccagcaaggcggcaaactgaatgaagtcactaaagaagacctgattaaactggtcgagtttgataacaaagaatatctctattacaaagcgattgcgccagatattgccttcattcgcgctaccacctgcgacagtgaaggctacgccacttttgaagatgaggtgatgtatctcgacgcattggttattgcccaggcggtgcacaataacggcggtattgtgatgatgcaggtgcagaaaatggttaagaaagccacgctgcatcctaaatctgtccgtattccgggttatctggtggatattgtggtggtcgatccggatcaaacccaactgtatggcggtgcaccggttaaccgctttatttctggtgacttcacccttgatgacagtaccaaacttagcctgcccctaaaccaacgtaaattagttgcgcggcgcgcattattcgaaatgcgtaaaggcgcggtggggaatgtcggcgtcggtattgctgacggcattggcctggtcgcccgagaagaaggttgtgctgatgactttattctgacggtagaaacaggtccgattggcggaattactagtcaggggatcgcctttggcgcgaacgtgaatacccgtgccattctggatatgacgtcccagtttgatttttatcacggtggcggtctggatgtttgttatttgagttttgctgaagtcgaccagcacggtaacgtcggcgtgcataaattcaatggtaaaatcatgggcaccggtggatttattgatatcagtgccactagcaagaaaatcattttctgcggcacattaactgcgggcagtttaaaaacagaaattaccgacggcaaattaaatatcgtccaggaaggacgggtgaagaaatttattcgggaactaccggaaattactttcagcggaaaaatcgctctcgagcgagggctggatgttcgttatatcactgagcgcgcagtattcacgctgaaagaagacggcctgcatttaatcgaaatcgcccctggcgtcgatttacaaaaagatattctcgacaaaatggatttcaccccagtgattagcccagaactcaaactgatggacgaaagattatttatcgatgcggcgatgggctttgtcctgcctgaagcggctcattaacaggagtataatgatggatttttctttaactgaagaacaagaactgctgctggccagtattcgcgaactgattacgactaactttccggaagagtatttccgcacctgcgatcaaaacgggacatatccgcgtgagtttatgcgggcgctggcggataacggtatttccatgcttggcgtgccggaagaatttggtggtatccctgcggattacgtcacccaaatgctggcgctgatggaagtgagtaaatgcggtgctccggcatttttaattaccaacggtcaatgtattcacagtatgcgccgtttcggttctgcagagcagctacgtaaaacggcagagagcaccctggaaacgggtgatcccgcctatgccctggcgttgacggaaccaggtgctggcagtgataacaacagtgccactaccacttacacgcgtaaaaacggcaaggtctacatcaacggacaaaaaacctttattaccggtgcgaaagagtacccgtatatgctggtgctggcgcgcgatccgcaaccgaaagatcccaaaaaagccttcaccctgtggtgggtcgactccagtaagcccggcattaagattaacccgctgcataaaatcggctggcatatgctcagcacctgcgaagtctatctcgacaacgtggaggttgaagagagcgacatggtgggcgaagaaggaatgggtttcctcaatgtgatgtacaactttgagatggagcgcctgatcaacgccgcgcgcagcaccggctttgccgaatgcgcctttgaagatgccgcccgctatgccaaccaacgtatcgcttttggtaagcccattggtcataaccagatgatccaggaaaaactggcgctgatggcgattaagatcgacaacatgcgcaacatggtgctgaaagtggcatggcaagccgatcagcatcagagtctgcgcaccagcgcggcgctggcaaaactgtactgtgcacgtaccgcaatggaagtcattgatgatgcgattcaaatcatgggcggtctgggctataccgatgaggcgcgcgtctcccgcttctggcgtgatgtccgttgtgaacgtatcggcggcggtacagacgaaattatgatttacgtagcaggtcggcagatcctgaaagactatcagaacaaataatctgcaggcggcgcagcttcttaacaaactgcgccgccagatttatccaacaagacttaccggttgaggaaattcagataggatttcttgttccgcaaaacagtttttaaattgtctacggtaatcgctggggctacaaccgacatggcgcaaaaacagtttggcaaagtgatcgacattttcataacccacacgccaggagatctctgcctgacttaattcagtattagtgagactccattttgcttccgtcatacgccgttgaataacatagttaataggggaaatacgatactctttggtaaattcatggcaaatataactgacgctggcacgaaattttttgcttaactgttctaaagtgattttttcgcgataattattattcagatagaaaagaatatcttttatcagaacatcttttttaatatacccctgctcgctacgataagcatttttaaaattttcgtagtaaagaatggctaacgtataggcaaatgcatcccataagctagatgtttggctatttttactttgcggcaaaatcacacttagctcattaaataaggtttttatgacttcttttccctgccccgcggcaattaccggacaagaatgcggttgcagtagctgattttcctcagccccctgaaactgaaagccgtacagcgcacaggtacacgtcgttgccggatcgttaacgtcagaggccaccgcatgcagcctgccgcgttctatcaccacaatgtcatccgcatgtgcgacatataagctagaatcgatggtaaaccttgcaacccctttcttgacgtaaatcaactcggtttcattgtcatgaacgtgatgtccggactcccattttggatcatcgctaaatgcaaaacgactaagccgtggcgttttaccggcgacaaacagcgtttcactggcgttatcaaaacagcgttgatacatgacaacctccctattccatgagcaagcaaaaacaatatatgccggataaaatacggcgtgtattgcggttatacaaccgcgtttagcgagagctaaacaagattatttacactgaatgcaagattgtacggtcatggaataactatattgccgcaaattgcacttttgttttagcgatcgcattttttttgcaagattgttggcaaggaaaacagcttgctccgtcgaaaaccccgcaccgctatcgcacactattttcaggccatttttaccttccatcggagatggttccgtatgcgactcacaggagaaatcatgaaaataataacctgctttaagctggtgcctgaagaacaggacattgttgtcactccagaatacaccctgaatttcgacaatgccgacgccaaaatcagccagttcgatctcaatgccattgaagctgcaagccagctcgcaacagatgacgatgagatagccgcgctgaccgttggcggcagtttgttgcagaacagcaaagtgcgcaaagacgtgctatcccgcgggccgcacagcctgtatttggtgcaggatgcgcaacttgaacatgcactgcctctcgataccgcaaaagcgctggcggcagcaattgaaaagatcggcttcgatttactgatctttggtgaaggttccggcgacctttatgcccagcaggttggcttgctggtcggagaaattctgcaacttccggtgattaatgcagtgagtgctattcagcgtcagggcaatacactggtgattgaacgcacgcttgaagatgatgttgaagttattgaactctctgttccagccgtgctctgcgtcacctccgatattaacgtgccacgcattcctagcatgaaagccattctcggcgcgggtaaaaaaccggtaaatcagtggcaggcaagtgatattgactggagccagagcgcgccacttgctgaactggtcggcattcgcgtaccgccgcaaacagaacgtaagcacatcattatcgataacgatagcccggaggccattgccgagctggcggaacatctgaagaaagccctgaactgaagcctacggagaagaaacgatgagtcaattaaacagcgtctgggtctttagcgataatcctgaacgttatgctgaactgtttggcggcgctcagcaatggggccaacaggtgtatgccattgtacaaaataccgaccaggcgcaggcagttatgccttatggtccaaaatgtctttatgttcttgcgcaaaacgacgcgctgcaacgcactgaaaattacgccgaaagcattgctgccctgctgaaagataaacaccccgctatgttgctgttggccgcgacgaaacgtggtaaagcgctggcagcacggttaagtgtgcaactgaatgcggcgctggtgaacgatgccacggcggtggatattgtcgatggtcacatttgcgccgaacaccggatgtatggcgggttagcgttcgctcaggaaaagatcaacagcccgctggcgatcattacccttgcacccggtgttcaggaaccgtgcaccagtgatacctctcatcagtgcccgacagaaacggtaccttatgttgctccgcgtcatgaaattctctgtcgcgaacgccgtgcgaaagccgcaagcagcgtggacctgagcaaagcaaaacgtgtggttggcgtcggtcgtggactggcggcgcaggatgacctaaaaatggtccacgaactggcggcggtgctgaatgctgaagtcggctgtagtcgtccaattgccgaaggcgagaactggatggagcgtgaacgttatatcggtgtctccggcgtgttgctgaaatccgatctctacctgacgctggggatctccgggcagatccagcatatggttggcggcaacggcgcaaaagtgattgtcgccatcaataaagataaaaatgcgccaatcttcaactatgccgactacggtctggtgggcgatatctacaaagtcgtccctgccctgattagccagttgagccgctaattcccctttcaaccacatctcccgctgtaaacgcagcgggaagggagcataacgcatgagcgatgacaaatttgatgccattgtggtcggtgcgggcgttgctggtagcgttgccgcactggtcatggcacgagccgggctggatgtcctggtgatagaacgcggcgacagtgccggatgtaaaaacatgaccggcgggcgtctttatgcccacacacttgaagcaatcattccaggctttgcagtaagtgcgccggtagaacgcaaggtcacacgcgagaaaatctccttcttaaccgaagaaagcgccgttaccctcgattttcaccgcgagcagccagatgttccgcaacacgcatcttataccgtattgcgtaatcgtctggacccgtggttgatggaacaagccgagcaggcgggcgcgcagtttatcccaggcgttcgcgtcgacgcgctggttcgtgaaggaaacaaggtcactggcgtgcaggctggggatgatattctcgaagcgaatgtggtgattctggctgatggcgttaacagcatgcttggccgcagcctgggaatggttcccgcttccgatccgcatcattacgctgttggtgttaaagaggttattggcctcacaccagaacagatcaacgatcgctttaatattacgggcgaggaaggtgccgcctggctgtttgccggttccccttctgacggcctgatgggcgggggatttctctataccaacaaggattccatatccttggggctggtttgtggattgggtgatatcgcccatgcgcaaaaaagcgtgccgcaaatgctggaagattttaaacaacaccccgccattcgcccgctgattagcggcggcaaactgcttgaatattccgcgcatatggtgccggaaggcggtctggcaatggtgccgcaactggttaacgagggcgtgatgatcgttggtgacgccgcaggcttctgcctgaatttgggttttacggtccgcggcatggatttagccattgcaagcgctcaggctgccgccacaacggtgatcgccgccaaagaacgcgcggatttctccgccagcagtctggcgcaatacaaacgtgagctggaacaaagctgcgtcatgcgtgatatgcagcattttcgcaagatcccggcgctgatggaaaacccgcgcctgtttagccaatacccacgaatggtagccgacatcatgaacgagatgttcaccatcgacggcaaaccaaaccagccggtacgaaaaatgatcatgggacatgcgaagaaaattgggctgatcaacttgctgaaagatggcattaagggagcaaccgcgctatgagccagaacgctacggttaacgtcgacatcaaattaggcgtcaataaattccatgttgatgagggccacccgcatatcattctggcggaaaatcccgatatcaatgaattccataaattaatgaaagcctgccctgccggactttataagcaggatgacgcaggaaacattcattttgattccgccggttgtctggagtgcggcacctgtcgggtgctgtgcggtaacactattctcgaacagtggcaatatcccgcaggcaccttcggtattgattttcgctacggctaatcatgcatcccacaggcccgcatctcgggcctgatgttctgtttcgagagtccaacatgaaagtgacattaacgtttaacgaacaacgtcgtgcggcgtatcgtcagcaagggttatggggcgatgctagcctggccgattactggcagcagaccgctcgtgcgatgccagacaaaattgccgtggtcgataatcatggtgcaagctacacctatagcgcgctcgatcacgccgcgagctgtctggcaaactggatgttagcgaagggtattgaaagtggcgatcgcatcgcatttcaactgcctggctggtgtgaatttaccgttatctatcttgcctgcctgaaaatcggtgcagtttccgtgccgctgttgccttcctggcgggaagcagaactggtgtgggtgctcaataagtgtcaggcaaaaatgttctttgcaccgacgttgtttaaacaaacgcgtccggtagatttaatcctgccgctgcaaaatcagcttccacaactacaacaaattgtcggcgtggacaaactggctcccgccacctcttccctcagtttaagtcagattatcgccgacaataccagtctgaccacggcgataacgacccacggcgatgaattagctgcggtgctgtttacctccggaaccgagggtctgccaaagggcgtgatgctaacgcataacaatattctcgccagtgagcgggcttattgcgcgcgactgaatctgacctggcaggatgtctttatgatgcctgcgccacttggtcacgcaacgggctttctgcatggcgtaacggcaccattcttaattggcgctcgcagcgtgttgttagatattttcactcctgatgcgtgtctcgcgctgcttgagcagcagcgttgcacctgtatgctcggcgcaacgccgtttgtctatgatcttttgaatgtactagagaaacaacccgcggaccttagtgcgctgcgtttctttctttgcggcggaaccacaatccccaaaaaagtggcgcgtgaatgccagcagcgcggcattaaattattaagtgtttatggttccacagaaagtagcccgcatgcggtggtgaatctcgatgatcctttgagccgctttatgcacaccgatggttacgctgccgcaggtgtagagattaaagtggtcgatgacgcacgcaagaccttaccgccaggttgcgaaggtgaagaagccagccgtggccccaatgtgtttatggggtattttgatgaacctgaattaaccgcccgtgccctggatgaagaaggctggtattacagcggcgatctctgccgtatggatgaggctggctatataaaaattaccggacgcaaaaaagatattattgtccgcggcggcgaaaatattagcagccgtgaagtggaagatattttattgcagcatcctaaaattcacgatgcctgtgtggttgcaatgtccgatgaacgtttaggtgaacgaagttgcgcttatgtcgtgctgaaagcgccgcatcatagtttaagcctggaagaggtagtggctttttttagccgtaaacgggtcgcaaaatataaatatcctgaacatatcgtggtaatcgaaaaactaccgcgaactaccagtggtaaaatacaaaagtttttgttaagaaaagatattatgcggcgtttaacgcaggatgtctgtgaagagattgaataagtttcatcttcggggatcacataaccccggcgactaaacgccgccggggatttattttatttcttcagttcagccaggcttaaccaggtttgcaccacggtgtccgggttcagagacaggctatcgatcccctcttccatcaaccatgcggcaaagtcttcgtggtcggacggaccctgaccgcaaatcccgacatatttgccctgtttcttcgcggcacggatagccatgctcagcagtgctttcaccgcatcgttgcgctcatcgaacaattcagacaccacgccggagtcacggtccagaccgagcgccagctgcgtcatatcgttactgccaatactgaagccgtcgaaatattcgaggaactgctcggccagcaaggcgttggacgggatttcacacatcatgatgattttcagcccgttctcgccacgtttcagcccctgacgcgccagttcttcaaccaccgctttcgcctgatctacggtacgcacgaacgggatcatgatctcaacgttggtcagtcccatgtcgttgcgcacacgtttcactgcttcacactccagcgcgaaacagtcgcggaagctgtcggaaacatagcggcccgcgccacggaagccgagcatcgggttctcttcatctggctcgtaacgctcaccaccgaccaggttggcatattcgttgcttttaaaatcagagagacggacaatgacgcgcttcggataaaacgcggcacccagcgtcgcgatcccttcagtcagacgaccaacgtaaaattcacgcggagaatcaaaacctttcatcatctcgcggatttcgttttgcaactgcggttcctgatcgtcaaactcaagcagtgcgcgtgggtggacgccaatcatacggttgatgataaattccagacgcgcaaggcccacgccttcgttcggtaggcaggcgaagtcgaaagcacggtccgggttaccgacgttcatcatcactttcaacggcagatccggcatcgtttctacgctggagcttttcacgctaaattccagcaactccgcatagacgtaaccggtatcaccttcggcacaagaaacagtgacgttctcaccgtctttcatccgttctgttgcatctccacagcccactaccgccggaatgcccagttcacgagcgatgatcgccgcgtgacaggtacgaccgccacggttggtgacgatggcagatgctttcttcatgatcggttcccagtccgggtcggtcatgtcagtaaccagcacgtcgccaggttcgatgcggttcatttcgctgatgtcatggatgactttcaccggacccgcaccgatgcgatgaccgatagcacggccttcggcgataatcttaccctgactatgcagcgtataacgctccatgacctgaccgcgactgcgcacggtttccggacgcgcctgcacaatgaacagtttaccggtgtggccatctttcgcccactcaatatccatcgggcgaccgtagtgtttctcaatttgtacggcctgttttgccagttcctgcacttcttcgttggtcaggctgaagatgtcacgctgttcctgcggtacgtcttcgattttaacctgcttgccgtgctcctgggtcggcgcgtaaaccatgcggatttttttgctccccatggtgcggcgcacgatagccgggcgattcgccgccagtgtcggtttatgcacgtaaaactcatccgggttaaccgcaccctgcacgaccatctcaccaaggccccatgcggaagtgataaacaccacctggtcaaagccggattcggtatcaatggagaacatcacgccagaacttgcgaggtcagagcgcaccatccgttgaacaccggcggagagcgccacaccacggtgatcgtaaccctggtgcacacgataagagatggcgcgatcgttaaacagagaagcaaatacatgtttcactgccacgagaacggcgtcaaaaccctgaacgttgaggaaggtttcctgctgaccggcaaaagaagcgtccggcatatcttctgcggtggcggaggagcgcaccgcaaaagaggcgttttcgtcatcggcggaaagctgtgcataggcttcgcggatggcgttttccagctcaggctggaagggagtgtcgataatccactggcggatttgcgcgcccgctttcgcaagctgagtaacatcgtcaatatccgttttatccagcagttcataaatgcgctggtttacgccgctttggtccagaaactggttaaacgcgtcggcggttgtggcgaaaccattcggaacggaaacacccattccggaaagattagtaatcatttcacccagggaggcatttttgcccccaaccctgtctacatcattcatgccgagttggttataccaaagcaccagcggactgctgccattgttggacatcgaacaatccttttgtgataaatgaacggtttgagaaacacatttctgcgcatttatctttgcatatttaaccggatgaaaaaaacggtgaatcgttcaagcaaatatatttttttactttttaagactgatcccagcgttgcgcaaatctgctctcttcgacaatttccacataaaccatcggtataaacgaaaccataaaaatgaaatgctgttttcataaaaaataaaattgaaggttcattttataaaccagacataacgttctacgcttctgtgcgtttttaatttatgctttcatagaattatgtctgcatcacgggaagaacaaaatggataatgctgttgatcgccacgttttttatatttctgatggtacggcaataactgcggaggtattaggacacgcagtaatgagtcaatttcccgtcactatcagcagcatcacgctgccgtttgtcgaaaatgagagccgtgcacgggcagtgaaggatcagattgacgcaatttatcaccagacaggcgtgcgcccgctggtcttctactccatcgtgttgccggagattcgcgccatcatcttgcaaagtgaaggcttttgccaggatatcgttcaggcgctggttgccccgctacaacaagagatgaaactggatccaacgccgattgctcatcgtacccatggccttaaccctaataatctcaataaatatgatgcgcgcattgcggcgattgattacaccctcgcccacgatgacggcattagcttgcgcaatctggaccaggctcaggtgatcctgctcggtgtttctcgctgtggtaaaacccccaccagtctgtatctggcaatgcagtttggtatccgcgcggcaaactacccctttattgccgacgatatggataatctggtgctacccgcgagcctcaaaccgcttcagcataaattgttcggcctgactatcgacccggaacgtctggcggcgattcgcgaggaacgtcgggagaacagtcgctatgccagccttcgtcagtgcaggatggaagtcgcggaagtggaagccttgtaccgtaaaaatcagatcccgtggattaacagtaccaattatagcgtagaagagattgccaccaagatcctcgatatcatgggccttagtcgccgaatgtactaaagaactagtgcattagcttatttttttgttatcatgctaaccacccggcgaggtgtgacacacctcgcacttgaaatcagcagcgattggtttatcgtgatgcgcatcacttcccggcagtcctgccgtagaagcaacaaatttctgagacttgtaatgaacagaactgacgaactccgtactgcgcgtattgagagcctggtaacgcccgccgaactcgcgctacggtatcccgtaacgcctggcgtcgccacccatgtcaccgactcccgccgcagaattgaaaaaatactgaatggtgaagataagcgactgttggtcattattggcccctgcagcatccacgatctcaccgctgcaatggagtacgccacccgtctgcagagcctgcgcaaccagtaccagagtcggctggaaatcgtaatgcgcacctattttgaaaaaccacgaactgttgtcggctggaaaggactaatctccgatccagatttaaacggcagctatcgggtaaatcacggtctggagctggcgcgcaaattacttttacaggtaaatgagctgggcgtcccaaccgcgaccgagttcctcgatatggtgaccggtcagtttattgctgatttaatcagttggggcgcgattggcgcacgtactaccgaaagtcagatccaccgcgaaatggctagcgcactctcctgtccggtaggttttaaaaatggtaccgatggcaatacgcggattgctgtggatgctatccgcgcagcccgcgccagccatatgttcctcagcccagacaaaaatggtcagatgaccatctatcagaccagcggcaacccgtatggccacattattatgcgtggcggcaaaaaaccgaattatcatgccgatgatatcgccgcagcctgcgatacgctgcacgagtttgatttacctgaacatctggtggtggatttcagccacggtaactgccagaagcagcaccgtcgccagttagaagtttgtgaggatatttgtcagcaaatccgcaatggctctacggcgattgctggaattatggcggaaagtttcctgcgcgaaggaacgcaaaaaatcgtcggcagtcagccgctcacttacggtcaatccattaccgacccgtgtctgggctgggaggataccgaacgcctggtcgaaaaactcgcctctgcggtagatacccgcttctgaatgcgtgcccattcctgacggaatgggcatttctgcgcaacttgttgtcttctcaacaaattactgcttgctctggtcagccataatattgataataagaatcattgttatatcaattattattaatttttatgcgttatacggatagcagaaaactcacgcctgaaacggatgccaatcacaagaccgcttccccgcagcctattcggcgaatttccagccagacactgttaggtccggatggcaaactgattatcgatcatgacgggcaagaatatctgctccgtaaaactcaggctggcaagctgctgttgaccaagtaacctttaactgctgcagctgacttccagccgtttaccccagtcaggtggacgactgacatagtcatcatctctgtcgctgaaaggatttcgcaacgcctcatgcaggcggtgcaattccgtcatatcacccttttctgccgcttcaatcgcccgttgcgccaaccagttgcgcaataccagagcggggttaacgctttgcatcagttgctgacgctcactatcgctaacctcgtcttgttgcaaacgcccccgataacgggcaaaccagtcatcaaatgccgcacgatcaataaactcatcacgtagcggactcgccgcgctgtgctgctcggtcagactcagcatgcggaatgtgcgggtataatcgctgcgctctcgcgccatcagactgaataattcattcagtagcgcgttatcctctttttgctccgtcatgaagcccagtttctgccgcatccgttctccataatgcgtcaacaaaacctgctgatagctgtccagggcctcattcagggcatctacggcaacaaatgggctcaatgtctgcgccagacgctgtaaattccacaacgcgacggcaggttgattatcaaagctgtaacgcccttgatgatcgctgtgattacaaataaaaccgggttcgtaatcatcaagaaaaccaaacggcccgtaatcaagcgtcagccccagcaggctcatgttgtcggtattcatcaccccatgagcaaagccgaccgtctgccattgggcaattaagctcgcggtacgtgcgacaacatcgctaaaccagagacggtatttgtcctcatcatctgcaagatgactccagtaatgacgaatagcaaagtcagctaactgacgaaccttttcgctctcgcggcggtagtaaaaatgttcgaaatgaccaaagcgcagatgacttggtgccacacgcatcagcatcgcgcctggctccgccgtttcccgatacactgggctatcgctggtgacgatacttaacgcgcgggtcgtcggaatgcccagataatgcatcgcctcactggcgagactttctcgtatcgtgctacgtaaaaccgcccgtccatcacccattcggctataaggcgtcaggccagcacctttcagatgccagtccattgtagtgccatcagcaagcagttgttcgccgagtaaaatgccgcgcccatcacccagttggcccgcccagacgccgaactgatgaccactgtaaacctgcgccagtggactcataccaggcagtagggcttcgccgccccagacacctgcgccatttttaaacaggctgcttggaatactcagcgtgttagccagttcggtattatgccaaatcagccgggcattatttaaaggcgtaggggaaagtgctgtataggtttctggcaattcatcgcgccagcgggtaacaaaagacagggtcatagatcctcctgtttgatagtgtagacggttactctcgtcttaaacaccagcaaacagaagggttatcgctgaaccaacgtcgttatctgatttatgggaacggcaggccacaggcatccctggagagcatggaaatcgaagggggtaatctgtgccaatatttctgccgtatcaatgcctcccgcaatgatgcaattgcaacaaggggaaatttgcgcctggatcgcacgaataaacggttcgaaggagcggtgcgtgatttgttgctgaataaaacttttatccagcatgacgcgggtgaaaagaccatcaaaaaccgctttcattgtgctattgcctgctcccaaattacctaacacaaggggatacacttggcttaaggataaaagaccgcgattatcttttccttcattgagatgcgggtaattctcattaatcaacagttcaataaacggatattttaatagttcgcctgcgtaattatccctctctaataataatgtagccacttgtggcgttaaattaagccaggcaaagagtttatgttgaataaaaaaatgttggcaactttttagtaattccaactgctcactaaataattgccaatgttgctcctcggtaagttgcgctataacccgactcgtcgggatacgaaccgtaccatcttcactggagaaatgggtaattaactcaacgccgacaaggacttgctggttgtctcttatcggcaggaaatagcaatcagaatgataaagattctccaaaaaaatcttcatggtaaccgtccctctcgaaggatgtttttcagtatccggctaaaagggatgaggccataagacataacaattacagaaggagtaactttcatttgttccatgttaaccactttttcaggggtcctttttttagattatcctgattataaacgaataatccatttacggaatttttgtctgcaaaatactactgtattcaggagtaaatggacggcgatgtatcatcgccgtccatttttcgacatattagattcgtctcgcctgccagaaatttttctgccaatagacattatcaagactggaacgcatcactcccttgctggtagaggcgtggataaattggttgttggtatcgtaaatacctacatgcaaaccattttgtccggaccccgttttgaaaaagaccaggtcacctggcagcaactcgtctttatcaatttgcgtgccaatagaggcttgttgtttggtttcacggggcagctgcaaatcgaaacgatcgcgcatcgtcacaaccacaaatccgctacagtccacaccgcgccgcgtcatgccaccataacgatacggcgtgccatgccagctttgtagctggtcgttcaaaccggcaataacggtaatgctatcagaaagtctggcatttggcggcggtgctttatggtggctacacccggccagaagcagtgctgtgatcaaaataaggcagaaacgcattccgtacggttcctctgttttttattcttgcattaatttagcgtcgtaattacccgattttcaagatactaatgaaatcagatggtgctaatcagcattctgtgaccttcgatatccagacggcgaaaattcatcccataggcctgcgccagatttggcggcgtgagcacctcttccctgcgtccactggccagcatttttccaccttttagcaaccacgcccgatgcgcatgacgcaatgtgtggttgagatcgtgactgctcatcacaatcgccagtccttgctgacacagcgcgctcagaattttgtctaacgcactttgttgcgcaacatcaagactgttcatcggctcatcaagaagcagcaattggcctgcgggattggcttgtggtgtgatttgcaacaccaccgcagcaagacgtacgcgttgccattcaccgccggaaagttgattggtgctacgtccgagtttgtcatcaagagccagcgcccctgcgacatcattcagtagttcggtacgcgttttatcgtgctgatgcagtgtcaggtagtgccagaccggcgttgcaaacggcggcgtctgctgttgactaagataggcgcgatgcagcgcgagttttgttgcggaccatgcttccagtggttgccccgcgaactgaatgcttcccttaccgctggtcattccggccattcgcgccagtaaggtactcttacccgcgccattcggccccaccaggtgcaggatctccccagcccgaacctcgccagaaagcggccccaggcgggtagattccgcaacatcttgtaactgcatcacaatagacattattttgccaacgccagtttaatgctttccatcacaatgggatcttccggcgtcatatccggggaaaaacgctggatgacttttccgtccctgccaaccaggaatttttcaaaattccataaaatatcatccgggtacagcggtgcacggcctttgctgaccatacgggcatagaatccgctctcttccggcgcgactgcggtcggcgctgcggcaatcaatttttgatacagcggatggcgtccttcgccattaacttcaatcttactgaacatcgggaacgtcaccccccatgtggtggtacagtaagttttaatctcttcatcgctgcccggttcttgttccagaaactggttgcacgggaatcccagcaccataaaacctcgatcgacccaggctttctgaatattctccaactgctcatattgcggcgttaagccacacttactggcgacattgacaatcaacagcacattaccggcgaacttctccagcgtggtcacttcaccgtcgatatctttcactacggtcgtcagaatggaatcttgcatcgtttctcctgggtgtggtcagtaaaaatcttagcttttaatcatagaccgtctttttgcggttaacgtcctgcttttaacaataaccagataaacaccggcgcacctaacgttgcggtgaccacgccaataggcagctctgcggcagctaatgccaggcgcgctacaatatcggccagcagcaatgcgctcgcccctgccagcgcgcagccgggaagtaatacgcgatgatcggttaaaccacacaaccggagaatatgggggatcaccagaccaataaagccgatagcacccgccagcgccacactgacgccaaccatccagccggtcgctgccaccagcacattgcgccagaaccacaggggtaaacccagttgccgcgcgctgatctcgccaagtgctaacatattcatcggcctggactgacaacagatccacaacaacacggggatcaatgccagcatcagccagctttgccgccagtctacgccgccaaaaccgcccatcatccagtacatcagctgacgcaaatcaacactggtggaaaagtagatagcccacgtcattagtgcgctacagataatccctaatgcaacgccagccagcaataaccgactggtgctaagatgacgacgggcgaaacgtaagagtattaaagtgatgataagcgcgccagcaatcgcacacagccctagcgcccagttggggagttgcccttgcccaagcaataccgcggcgataagccccacgcctgcgccgttagagacgccaagtagtccaggttctgccagaggattttcaaacaacgcctgcattacagcgccggatatagccagcgccgcaccaaccagcaatacagccagcgtacgtggcaggcgaatttgccagacgaacagttcgccacgaggagtaaaccagtcacctgggctgatccattgttcaccggcgcaaaggcttaagagaagcgccagcagcatcaaaacactcaggcataataaccagcgaatattttgtcgctgttgttggcgggcaagtgtcagcatggtatccgttctgctgaagtgtcatggcgttgattttacggtgactcttcgacagtgaaaagaaaaaaggccgcagagcggcctttttagttagatcagattactcgtctttggggctagcgttttcgacccggctttttaacttctgcccgggtctgaaggtcaccacgcgccgtgctgtaatgggaatatcctcgcccgttttcgggttacgtcccgggcgttgattcttatcacgcagatcgaagttaccaaaaccagagagtttcacctgttcgccgttttccagagcgcgacggatctcttcgaaaaacagttcaaccagttctttggcatcccgcttgctaagcccaagcttatcaaacagatattcactcatttcagcttttgtaagcgccataggttcaatccctcaaacttgcctggaatcgctcttttaatgcctctacacatttggcgacggtagcggcaatctcctcttcttcgagtgtacggctggtatcttgcaggatcaggcttatggcgaggctcttatacccctccgcaacacccttaccgcggtacacgtcaaataagtttacgccaactacctgatttacgccaactttcttacattcggataaaatatccgctgcgggaacgttttctgcgaccaccaccgcgatgtcacgacggttcgccgggaagcgagaaatctcgcgcgcctgaggcaccacgcggtctgcgagcttgttccactccagttcgaacaccagagtgcgaccgttaagatccagtttacgttccagttcaggatgaacaaccccaacaaaaccaatacgttcacctttcagataaatcgctgcggattgccccggatgcagtgccggattcgcttctgcacggaactcaacctcattcagtttaccggtcaggtcgagaacggattcaagatcgcctttcaaatcatagaaatcaacggtctcttttgccaggttccagtgctcttcgtaacggttaccgcaaatcacaccggctaacatcagatcctgacgaatgcccaacggtgcctgagtatctggtacgaaacgcagaccgctttcgaaaatgcgcacacggttctgctgacggttctggttgtacaccacggttgccagcaggccagtccacagagaaagacgcattgcactcatttcaacagagatcgggcttggcagcagtaaggcttcaacgcctggatggatcatctgctgcactttcggatcaacgaagctgtaggtgatcacttcctgatagcctttgtcgttgagcagcgttttcacgcgcttgaggctcaggtcagcttcacggtgagtacccataatcaggcttgcctgtaccggctcatccgggatgttgttgtagccgtaaacacgcgcgacttcttcaaccagatcttcttcaatctccatatcgaaacgccagctcggcgcaactgcctgccattcgtctttgccttcggtcacttcgcagccgagacgacgcagaatgtcagttacctgctcatccgcaatatgatggccgatcaggcgatccagtttgctacgacgtagagtgatggttgcacgcttcggcagcgttgcttcgttggtgatatcaattaccgggccagcctcaccaccgcagatgtcgatcagcagacgggtcgcacgttccatcgctttgtgctgcagtgccggatcaacgccacgctcataacggtgagacgcatcggtatgcaggccatgacgacgagcacgaccggtgatagacagcgggctaaagaacgcgcattccagcagcacgttttgtgtttcgtcattcacgccagagtgttcgccaccgaagatgccgcccatcgccagcgccttgttgtggtcggcgatgaccagagtgtcagcattcagcttcgcttcagtaccgtcgagcagcaccagcgtttcgccctctttcgccatccgcaccacaatgccgccttcaatgcgatctttatcgaaagcgtgcatcggctggcccagttcgagcagcacatagttggtgacgtcaacaactgcatcgatagaacggatcccgcaacgacgcagtttttctttcatccacagcggagttggcgctttaacgttaatgccttttaccacacggccaagataacgcgggcaggcttccggcgcttcgactgtaatcggcagcgtgtcgtcgatggtcgcaccaaccggaacgatttccggttgaaccagcggcagctggttcagcacggcaacgtcacgcgcaacaccaatgatgcctaagcagtcggcacggtttggcgtcacgctgatttcgatggtgttgtcatcaagtttcaggtattcacggatatcggtgccaatcggcgcatccgcaggcagttcgataatgccgctgtgatcgtcagaaatgcccagttcagagaaggagcacagcatcccttcagacggttcgccacgcagtttcgccgctttaattttgaaatcacccggcagaacagcaccaatggtcgctaccgctacacgcaggccctgacggcagtttggcgcaccgcagacgatgtccagcaggcgatcgccgccgacattcacttttgtcacacgcagtttgtcagcgttcggatgctgcgcacactcaaccacttcaccaacgaccacgccgtggaagctgccggcaaccggttctacaccgtcaacttccaggcccgccatagtgatttgatttgccagcgcatcgctatcaatcgccgggttcacccattcgcgtaaccacagttcactgaatttcataatctattcctgccttatttaaactgtttgaggaaacgcagatcgttttcgaagaaactacgcaggtcggtgacgccgtaacgcaacatagtcagacgctccatccccatcccgaaggcgaaaccagagtaaacttccgggtcgatgccaacgttacgcaacacgttcggatgcaccatcccgcagcccagcacttccagccatttaccgtttttacccatgacgtccacttctgcagaaggttcggtaaacgggaagtaggaaggacggaagcgaatctgcaaatcttcctcaaagaagttacgcaggaagtcgtgcagcgtgcctttcaggttggtaaagctgatgttggtatcaacaatcagaccttccatctgatggaacatcggcgtgtgagtctggtcgtagtcgttacgataaacacggccaggcgcgatgatacgaatcggtggctgctgggctttcatggtgcggatctgtacgccagaggtctgggtacgcagcaggcgggtagtgtcaaaccagaaagtgtcgtggtcagcgcgcgccgggtggtgaccaggaatgttcagagcatcgaagttatgataatcgtcttcgatttccggcccggttgccacggtaaagccaagctcaccgaagaaactttcgatacggtcgatggtacgggtaaccggatgcagaccgccgttttcaatgcgacgacctggcagagagacatcaatcgtttccgccgccagacgcgcattcagtgcagcgctttccagttccgctttacgcgcattcagcgcctgctgaacctgctctttcgcttcgttgataaccgcaccagctgccggacgctcttctggcggcagctcacgcagggtcgtcatctgaagggttaagtgcccttttttacccaaatattcgacgcgcacattatctaacgcggcaacatcactcgcctggctaatggccgccttcgcactggcaaccagttctgcgagatgactcatggttttcctcattgtgtcagtggtgacactggttcgttggacttagagcctatcccatcaggctattttacttgccattttggtcccgggctgtgctcgaaattctcacgtacttaaatacgctccggtttctccgcgctggccgtgtccagtctggctgcgacaattacacctgatgagacaggctttttatttttcaaaacgcgcatacaaaaaaagcctccactgggaggctttcaggcgctgttttccgtttctcttctcacgcgctagcctcctggattcaggtgctaaagtaaaaaaagaagcggaaaatagcagcattcattgcttgcgttaccttttggtactcttcaaaagacctttattgaaaaggctacggcgataaaagtcaatgttttgatggcgttgaaacgaaaagagggagactagctccctctttcaactggcttatgccagagctgctttcgctttttcaaccagagcggtgaacgctactttgtcgaatactgcgatatcagccaggatcttacggtcgatttcaacagaggcttttttcaggccattgatgaatttgctgtaagaaataccgttctgacgtgctgctgcgttgatacgcgcaatccacagttgacggaactgacgcttacgttgacgacggtcacggtaagcatactgaccagctttgataacagcctggaaggcaacgcggtatacgcgagaacgcgcaccgtagtagcctttagcttgtttcaaaattttcttgtgacgtgcacgtgcaataacaccacgttttacgcgagccatatgtgctctcctgtatctatattctaattaaaaagttaaaaacgttaacggcttatgcgtacggcaggcacgcgattaccaggcccagatcgcctttggaaaccatggctttcggacgcaggtgacgtttacgtttggtcgcttttttggtcagaatgtgacgcaggttagcgtgcttgtgcttaaaaccacctttaccggtttttttgaagcgcttagcagcaccgcgtacggtcttaatttttggcattttaataacttccacttcgcattgttaataaacgaaacaaaggcgaacaaagcctgtgaagcccgaaggctccacagacagtgctacttgaaggccttactgtttcttcttaggagcgagcaccatgatcatctggcggccttcgatcttcgttgggaaggattcgaccactgccagttcttgcaaatcgtctttcacgcgattaagcacttccataccgatttgctggtgcgccatctcacgaccgcggaaacgcagcgtgattttggctttatcaccctcttcgagaaagcgaatcaggctgcggagttttacctgatagtcgccttcatctgtaccaggacggaatttaatttccttaacctggataactttttgctttttcttctgttccttagaagacttgctcttttcatagaggaatttgccgtaatccattatacgacaaaccggcggctcggcgttagggctgatctcgactaagtctactccggcttcttctgctttctccagagcttctctcagactcacaataccaagctgctcgccttccagacctgttaagcgaacttcctgggcgcgaatttcgccattgatacggttagggcgcgccgtttgaactcgttttccgcctttaataccttattcctccaattgtttaagactgcggctgcgaatctcttgttgcagcttctcgatcacttcatttacgtccatgcttcccaggtctttaccacggcgggtgcgaacggtaactttgccactttccacctctttatcaccacagaccagcatatatgggacgcgacgcaaagtgtgctcgcggattttaaagccaatcttctcatttctcaagtctgctttaacacgaatgcccgcattacttagtttttgcgtcaattcgttaacgtattcagactgactatcggtaatattcatgataacaacctgaaccggcgcaagccaggtcgggaagaaaccagcgaactcttcggtcaggataccgatgaaacgttccatgctccccagaattgcgcggtgaatcattaccggtactttacgttcattgtcttcgcctacataagaagcgctcagacgagacggcaaagagaagtccagctgtactgtaccgcactgccatgcacgatcgaggcagtcatacagggtaaattcaattttcggaccgtagaaagcgccttcacccagttgatattcaaacgggatgttgttttcttccagcgcaaccgccaggtccgcctcagcacgatcccacatttcgtcgctgccaatacgtttttcaggacgagtggagagtttgacgacgatcttctcgaagccaaaagtgctgtacatatcatagactaaacggatacatccgttaacttcatcgcgaatttgttcttcagtacagaagatatgcgcgtcatcctgggtaaatccacgcacgcgcatcaggccatgcaggctaccactcggctcgttacggtggcagctaccaaactcggccatacgcagcggcagatcgcgataagacttcagcccctggttgaaaatttgtacgtgacccgggcagttcatcggcttaatgcagtattcacggttctcagaagatgtggtgaacattgcatctttgtagttgtcccagtgaccggttttttcccacaggacacggtccatcatgaacggacctttaacttcctgatactggtactctttcagtttagaacgaacaaacacttccagttcacggaagatggtccagccgtcgttgtgccagaataccatacccggcgcttcttcctgcatatggtacaggtcgagctgtttaccgattttacggtggtcgcgtttcgcggcttcttccaggcgctgcaggtaagcgttaagtgcttttttgtctgcccacgccgtaccgtaaatacgttgcaacattttgttgttgctgtcgccacgccagtaagcccctgccgttttcattagtttgaaatgatggcagaaacgcatgttcggtacgtgcggaccgcggcacatatcgacatattcttcatggaagtacagacctggcttgtcatcatgggcgatgttttcgtcaagaatggagactttgtagctctccccacggttggcgaaagtttcacgcgcttcgtgccagctgactttcttcttaatgacgtcgtagtttttctcagcaagctcatgcatccgcttctcgagtgcttcgacatcttcctgggttaacgtgcggtcaagatcaacgtcgtaataaaaaccgttgtcaataaccgggccgattgccattttggtatgcggccaaagttgtttaatcgcgtgccctaacaggtgcgcacaggagtgacgaatgatctccagaccttcttcgtctttggcggtaatgatgctcagttgtgcgtcgttttcaatcagatcgcaagcatcaaccagttcgccattaacgcgccctgcgatacaggctttcgccagacctggaccaatgtccagcgcaacatccatggggcttacagcgtgatcgtaatggcgttggctgccatcaggaagagttataacaggcattttatatccttatttgcagtggtgacccacacgaaagatcacatacaaagaaaaatttgtttattaacagttcattgcgaaaccatctagccaacaaatgctaaattggttcgcaatcaggtacacaaatgaaagacattaacctctcaccttccacccggttgagcgatgttaacactaaaaaaagggagattgtacctttccgtttcacattgattcgattcgcaattcgtttgtagtgagtacaccagcaaaacgcttaaagaacaactgataacatcacggtgcgtctgaaaggtttactgcgagcggatttacagcagcataaactgaatccagcaaagttcgttgcgtgatttggcggtagtattttaaacgctcatgagattaatgacgaagtggtcatatcacaatgataaaagtgacacaattcttataacaatttttcgtgcacatttcgttctggcgataataattaatcatcatcctcaaaacctccagatatatataaggcgaacagattatgagtcaaaacgatatcattatcagaactcattataagtctcctcatagattgcacatcgatagcgacataccaacaccttcatcagagcctattaatcaatttgcgcgccagctcatcaccctacttgatacctctgacttaagttcgatgctgtcatactgtgttactcaggaatttaccgcaaactgtcgaaaaatatcacaaaattgttattccactgccctttttaccattaactttgccacttcacccatccatacagaaaatatactcattacattacactataaaaaagaaatcatttccttattactggaaaccacgcctattaaagctaaccatttgcgaagcatactggattatattgaacaggaacagttaactgctgaagatcgtaaccattgtatgaaactgtctaaaaaaatccatagagaaaaaaactatacacccaacagtaaatctcaatggtagtgcatgttttttgcaatctccttctgacgctattttttgtcgccatctgtcattgcaatacgcccttgattcattgagaaatggaaaaggcaaagtcaacctgattaaacattactcctccgttgaatccatacagcagcatgtccccttagtccgggacgcggagttcagagcattacttcgccatcctcctgcagggagtcgcgttatcgcgagtaaggattttggcttcgctttagatattttcttttgtcgaatgatggcaaacaatgtcagtcatatgtccgcgattttatatatagacaatcatactttgtcagtaaggctacgaataaagcagtcagtgtatggacaattaaattatgttgtgtccgtttacgacccgaacgataccaacgttgccgtcagagacacccacaggacagcacggggctttctttcgcttgataagttcatcagttcaggtcccgatgctcagacctgggctgatagatatgttcgcaactgtgcaattgctattctgcccctattacctgtgggagttccaggggctattttcgcgggtattgcatcacgaatgccatttgcccctatacatccatcggcaatgttgttaataatggctacaggccagtctcaacagcttattacattattcaaacagttgcccatactccctgaaaaagaaatcattgaaataataactgcgcagaatagcgttggtacacctgctttatttttggctatgatgaacggacatactgacaacgtgaaaatatttatgcaagaaattcagtcactggtagataatcacatcattcatgaagataatctggttaaattactgcaaactaaaagtgctaacgaaacacctggactttatatctccatgttgtatggattcgatgaaataatcgatatctttctgaatgcattaaccactccaatagcacaagagcttttaaacaaaaaactggtgatgagtattttagccatgaaaatacatgatggtgagccaggattatacgccgcaatggaaaataatcaccctttgtgtgtcacacggttcctctctaaaattaatggcatcgcctttaaatacaagttgagcaaagctaacatcatggatttattaaaaggagctacagcacagggaacccctgcattatacatcgccatgagcaagggtaatgaagacgtcgtgttatcttatatatcgacgctgggtgcttttgcaaaaaaacattcttttagtcaacatcagttatttacactattggccgctaaaaatcatgacaacatgtcagctgttcatatagccattcatcataagcattataaaactgtagaaacatattatgctgctattaatgcaatcagccaaagcctgagttttagtgctgatgaaataaagacgtatttataaccagctatttacgatatatatcgatacataattttatttttttcataaaacgcagaaacagtgaccatgtgcacaacgccacccgacggctgtaataacaaaaaatcccttgatgcctgtcccttttgttacactccgttatcacgcacaagagatatgcaggacactggtatgccgactaaacgctttgataaaaaacactggaagatggtggtggtgctactggcaatctgtggcgctatgttgttgctacgttgggcagcaatgatttggggctgagcagtgacaaacgaagacagccagaccgcataacacggtccggcagataattttacatgctgtagcccaggcttaaggttgtccgacggtcggtatgttccggtgcagactctggaggttcagagttccatgtgacgttgtaagccaccttcagtccaaaatgttcattaatagcaacatttaatgcgctttcggagttcagcgttgtgtcttccgcgccaaagacgctaacaccctgcgtaaatttagcgttgtcagtcaactgccatgcataagccccggaggcatagcccagcggctgggtttcactggcattgtcggtatatttgtcgtaacgcacacctggaccgaattcaaagcggaaactgtgtaccgggccattcaaaaactgacgaccataacccgcggtcaacacatcgcgctctcgatagccgttataacggtctgtcagccagcttgcctgaccaaataaatagtcataatcagttaaattaaaacggctacgcccgcccgccgcatatttttcactagaacgctcatcattagaagaagtattactggcgttcccccacaggctccaggcagtggtgtgtccataccaggtcatggtggtgtcagccgtaagactggagcttttcgtattgccactttgtgcaagatatcctgcgttcagattaccttcgaaaggttttttagcgctggcaggatcatccatgacagtaaaaacggaatcatcggcagctgcattcagactcgcaaacatgccccccgccaacataacgatggcaggaactgtcttcaaaagcttcatttatcaagagtccgtacaacaaaaaaagagaccatcgcggtcccggaaactttcttaaggatcaaagattagcgtccctggaaaggtaacgaattataaaaaggcgcgaataacttagcaatgtattcttatttcattttttgaataagcatgtggcgaaaacagatttttatttatatatatttatctgcaaaattttaaataaagctccaataaatcatattgttaatttcttcactttccgctgattcggtgccagactgaaatcagcctataggaggaaatgatggtacgtatctatacgttgacacttgcgccctctctcgatagcgcaacaattaccccgcaaatttatcccgaaggaaaactgcgctgtaccgcaccggtgttcgaacccgggggcggcggcatcaacgtcgcccgcgccattgcccatcttggaggcagtgccacagcgatcttcccggcgggtggcgcgaccggcgaacacctggttagtctgttggcggatgaaaatgtccccgtcgctactgtagaagccaaagactggacccggcagaatttacacgtacatgtggaagcaagcggtgagcagtatcgttttgttatgccaggcgcggcattaaatgaagatgagtttcgccagcttgaagagcaagttctggaaattgaatccggggccatcctggtcataagcggaagcctgccgccaggtgtgaagctggaaaaattaacccaactgatttccgctgcgcaaaaacaagggatccgctgcatcgtcgacagttctggcgaagcgttaagtgcagcactggcaattggtaacatcgagttggttaagcctaaccaaaaagaactcagtgcgctggtgaatcgcgaactcacccagccggacgatgtccgcaaagccgcgcaggaaatcgttaatagcggcaaggccaaacgggttgtcgtttccctgggtccacaaggagcgctgggtgttgatagtgaaaactgtattcaggtggtgccaccaccggtgaaaagccagagtaccgttggcgctggtgacagcatggtcggcgcgatgacactgaaactggcagaaaatgcctctcttgaagagatggttcgttttggcgtagctgcggggagtgcagccacactcaatcagggaacacgtctgtgctcccatgacgatacgcaaaaaatttacgcttacctttcccgctaacaaaaacattcccccagcattgggggaatcatcaccaacctgtcggcaacgcgtttctccgactatgctcaaaagtcatgtgataacaaaggggtgaactatggccagtggcgatcttgtccgttatgtcataaccgtcatgttgcatgaggatacattgactgaaattaacgagttgaataattacctgactcgcgacggttttttgctcactatgacggatgatgagggaaatatccatgagctgggaactaacacttttggacttatcagtacccaaagtgaagaagaaattagagaactggttagcgggcttacccaaagtgcaaccggcaaagatcctgaaatcaccatcacgacctgggaggaatggaatagcaacagaaaataaatggtttttgggcaataatcagtctgtggtgtgcgttagctcgtgtttttacaccgcattcttgcgctaaccttatgatctggcagacaacatgggagagacatcatgtggcaggcaatcagtcgtcttttgagcgagcagttaggtgaaggcgaaatcgaactgcgtaatgaactgcctggcggagaagtccatgccgcatggcatttgcgctatgcaggacatgattttttcgtcaaatgtgatgaaagggaactgcttcccggttttaccgccgaagccgaccaactggagttactgagccgtagtaaaaccgtcaccgtgcctaaggtttgggcagttggcgctgaccgtgactacagttttctggtgatggattatctcccacctcgtccgctggatgcgcatagcgcatttattcttggtcagcaaattgcgcgtttacatcaatggagcgaccaaccacaatttggccttgatttcgataacgcgctctccacaactccacagcccaacacctggcaacgtcgctggagtacgttttttgctgaacaacggattggctggcagttggaactggctgcagaaaaagggatcgctttcggcaatatcgacgccatcgtcgagcatattcagcagcgtctggccagtcatcaaccgcagccttctctgttgcacggcgatttatggtccggcaactgtgcactgggtccggatggcccgtacattttcgacccggcctgctactggggtgaccgagagtgcgacctggcgatgttaccgctgcatactgaacagccgccacaaatctatgacggctatcagagtgtatccccgctacctgccgatttccttgaacgtcaaccggtttaccaactctacacgctgttaaatcgtgcaaggttatttggcggtcagcatttggttattgctcagcagagtttggatagattattagcagcatgatatgggttgaggataatggccgctccgtgcggccttttgattaaataaacccaagcagagaaaagaacacataacctgcagcaatacaaataaccggcaggatatacagactgaaaaactgcaggaaaatagtatggtgcggaacaacaatacgggactcaatttgttcacgcgttagcccctcttcccctttggctttttccagaatgagttgatcttcaacaccttcccgcaagaagcgcgcctggcgactcatccgggcaccggaatcctgcaacgccagtccgacaaaaatcaggatgaaaatcacccagaacataacgttcacgccaccattaaaattgggcgtcggggagttataccagaatagattcaaaaaaggcgtattcgcctgcatcatatcgatcatgacatgagtaaagtcgagcatgaccgcattaatgccttccttgttttcctgccgggtattcataaatttcagcaaagaaatcaatgtagagatcaatgcaggtataaaaatcacccaacccaaaatccttttcaaaacagcaatgcgtccagcttgttgatacgtcatgagttctccttgattaagacgcgtcgtttcacttagtttacctgtagatatctgttttcgcccattctttaaaggcgatatgataggcgcttaatcataagcacggcttaataccttacacataatgctctaaaggagaggttgtaatgagtaccccgcgtcagattcttgctgcaatttttgatatggatggattacttatcgacagtgaacctttatgggatcgagccgaactggatgtgatggcaagcctgggggtggatatctcccgtcgtaacgagctgccggacaccttaggtttacgcatcgatatggtggtcgatctttggtacgcccggcaaccgtggaatgggccaagccgtcaggaagtagtagaacgggttattgcccgtgccattagtctggttgaagagacacgtccattattaccaggcgtgcgcgaagccgttgcgttatgcaaagaacaaggtttattggtgggactggcctccgcgagtccactacatatgctggaaaaagtgttgaccatgtttgacttacgcgacagtttcgatgccctcgccagcgccgaaaaactgccttacagcaagccgcatccgcaagtatatctcgactgcgcagcaaaactgggcgttgaccctctgacctgcgtagcgctggaagatagcgtaaatggcatgatcgcctctaaagcagcccgcatgcgttccatcgtcgttcctgcgccagaagcgcaaaatgatccacgttttgtattagcagacgtcaaacttagtagcctgacagaactcaccgcaaaagaccttctcggttaatgaccaggggcagtgatctcgctgcccctggttctttatctgaaattgcattcaactgacggattaatcgtcaatttaagagaaagagttacaccgtcaccacttccgtgcactgtataaaaatcctatactgtacgtatcgacagtttagtgagttttatcatgacggcggaaggtcaccttctcttttctattgcttgtgcggtatttgccaaaaatgccgagctgacgcccgtgctggcacagggtgactggtggcatattgtcccttccgcaatcctgacgtgtttgttaccggacatcgatcacccaaagagctttcttgggcagcgattaaaatggataagtaaaccgatcgcccgcgcttttgggcatcgtggttttacccacagtctgctggcggtatttgcgctgctggcaaccttttaccttaaggttccggaaggctggttcattccggctgatgcgctacaaggaatggtgctgggttatttgagccacatacttgccgatatgctgacacccgccggtgttcccctgctctggccatgccgctggcgtttccgcttgcctatcctggttccccaaaagggcaaccaactggaacgttttatctgcatggcattatttgtctggagcgtatggatgccccatagtttacccgagaacagcgctgttcgttggagtagccaaatgatcaataccttgcagatccagtttcatcggcttattaagcatcaggttgaatactaaaaaggcaaaaatcacctttctggaataagcaattccatttgaatataagagccagctcacagttctgttaatcttgcgccaacactatgactgctacgcagtgatagaaataataagatcaggagaacggggatgaactttccattaattgcgaacatcgtggtgttcgttgtactgctgtttgcgctggctcagacccgccataaacagtggagtctggcgaaaaaagtgctggtgggtctggtgatgggtgtggtttttggccttgccctgcataccatttatggttctgacagccaggtacttaaagattctgtacagtggtttaacatcgttggtaacggctatgttcaactgctgcaaatgatcgttatgccgttagtcttcgcctctattctgagcgcggttgcccgtctgcataacgcatctcagttaggcaaaatcagttttctgaccatcggtacgcttttgtttaccacgctgattgcggcgctggtcggtgtgctggtcaccaacctgtttggtttgacggctgaaggtctggttcagggtggtgcagaaactgcacgtctgaacgccattgaaagtaactatgttggtaaagtctctgatctgagcgttccgcagctggtcttgtcctttatcccgaaaaacccgtttgccgatcttaccggagccaatccgacgagtattatcagcgtggtaatttttgccgcattcctcggcgtagctgcattgaaactgctgaaggatgatgcgccgaaaggtgaacgcgtcttagccgctatcgataccctacaaagctgggtgatgaaactggttcgcctggtcatgcagttgaccccttacggcgttctggctctaatgaccaaagtggttgcaggttctaacttgcaagacatcatcaaactgggaagtttcgttgtcgcgtcctacctcggtctgctgattatgtttgcagtgcatggcattctgctgggcattaatggcgtgagtccgctgaagtacttccgtaaggtatggcctgtgctgacgtttgcctttaccagccgttccagtgctgcgtctatcccactgaatgtggaagcacaaacgcgtcgtctgggcgttcctgaatccatcgccagtttcgccgcctctttcggtgcaaccattggtcagaacggctgcgccggtttgtatccggcaatgctggcggtgatggttgcgcctacggttggcattaacccgctggacccgatgtggattgcgacgctggtcggtattgttaccgttagttccgcaggcgttgccggtgtcggtggtggtgcaactttcgccgcactgattgtactgcctgcgatgggcctgccagtaaccctggtggcgctgttaatctccgttgaaccgcttatcgacatgggccgtacggcgttaaacgttagtggcagcatgacagctggcacgctgaccagccagtggctgaagcaaaccgataaagccattctggatagcgaagacgacgccgaactggcacaccattaattcttatgctggcaacggtccgttttgtataggggccgttgccttactttttaaatgttccatcgcggcgatgcatacactctcatatttaaacagatcgtcagcgaaaaaaatgtccaacttatcaatacattcctggctcaaactatgtgcctgtaggctgaagcttaaaacctcatacccgagacgttttctaagactactatctggaatactcataatatcttcaagcacaccacttcccattcccggaagatttagtggattaaaaagaagattgatattaagcatacttattatgctaggaaactttaggagactctcatttttttgaatcgcagcaaaaatgctcccgacaggatgtatataattttgttcatagtatatagtccttaaatagtgaataaccaacctgttttttatactgatcaaattggtcattttttctgggcgaaatacagaagtgacatccattccaataaaatctttatttatacctcttatccgaatttcactaccataaagattattaattattactctatatttaacattgtcctgcagatatgtatcaaaactaagtgctggcgctcctggcttactggcatcatagttaatgttagacatataggcaatcatataattaaagttactttctgctatttcatcgcagtcacattgacccgtacttataaagaaagtgagtgctgtcatagtagactgcagcctttctttaaaagagtcgaaagccaggcttttaatatttaaatcaccataattactctgtattaagtttgtagaaaacatctcccgcctcatattgttaacaaaattattatctcatttaaatctaagtcatttacaatataagtttaagagcgacgccacaggatgaactatcaaaaatagctcatcatgattagcaaaacttaaccattttaaaataaataaacaattaaagaaaaaagatcacttatttatagcaatagatcgtcaaaggcagctttttgttacaggtggtttgaatgaatgtagcaacgaaatacagaatttcaggtcatgtaactcccggcaaaaccgggaggtatgtaatccttactcagtcacttccccttcctggcggatctgatttgcccaacgttgggcagattcaggcacagtaaacgccggactgcgcagaaaactctctcccatcagtacaaacgcaacatatttgccacgcagcatccagacatcacgaaagctatccatctttatcgcatgttctggcggcgcgggttccgtgcgtgggacatagctaataatctggcggttttgctggcggagcggtttcttcattactggcttcactaaacgcatattaaaaatcagaaaaactgtagtttagccgatttagcccctgtacgtcccgctttgcgtgtatttcataacaccgtttccagaatagtctccgaagcgggatctggctggtggtctatagttagagagttttttgaccaaaacagcggccctttcagtaataaattaaggagacgagttcaatgagccaacataacgaaaagaacccacatcagcaccagagtccactacacgattccagcgaagcgaaaccggggatggacagtctggcacctgaggacggctctcatcgtccagcggctgaaccaacaccgccaggtgcacaacctaccgccccagggagcctgaaagcccctgatacgcgtaacgaaaaacttaattctctggaagacgtacgcaaaggcagtgaaaattatgcgctgaccactaatcagggcgtgcgcatcgccgacgatcaaaacagtctgcgtgccggtagccgtggtccaacgctgctggaagattttattctgcgcgagaaaatcacccactttgaccatgagcgcattccggaacgtattgttcatgcacgcggaagtgccgctcacggttatttccagccatataaaagcttaagcgatattaccaaagcggatttcctcagtgatccgaacaaaatcaccccagtatttgtacgtttctctaccgttcagggtggtgctggctctgctgataccgtgcgtgatatccgtggctttgccaccaagttctataccgaagagggtatttttgacctcgttggcaataacacgccaatcttctttatccaggatgcgcataaattccccgattttgttcatgcggtaaaaccagaaccgcactgggcaattccacaagggcaaagtgcccacgatactttctgggattatgtttctctgcaacctgaaactctgcacaacgtgatgtgggcgatgagcgatcgcggcatcccccgcagttaccgcaccatggaaggcttcggtattcacaccttccgcctgattaatgccgaagggaaggcaacgtttgtacgtttccactggaaaccactggcaggtaaagccagtctcgtttgggatgaagcacaaaaactcaccggacgtgacccggacttccaccgccgcgagttgtgggaagccattgaagcaggcgattttccggaatacgaactgggcttccagttgattcctgaagaagatgaattcaagttcgacttcgatcttctcgatccaaccaaacttatcccggaagaactggtgcccgttcagcgtgtcggcaaaatggtgctcaatcgcaacccggataacttctttgctgaaaacgaacaggcggctttccatcctgggcatatcgtgccgggactggacttcaccaacgatccgctgttgcagggacgtttgttctcctataccgatacacaaatcagtcgtcttggtgggccgaatttccatgagattccgattaaccgtccgacctgcccttaccataatttccagcgtgacggcatgcatcgcatggggatcgacactaacccggcgaattacgaaccgaacagcattaacgataactggccgcgcgaaacaccgccggggccgaaacgcggcggttttgaaagttaccaggagcgcgtggaaggcaataaagttcgcgagcgcagcccaagctttggcgaatattattcccatccgcgtctgttctggctaagtcagacgccatttgagcagcgccatattgtcgatggtttcagttttgagttaagcaaagtcgttcgtccgtatattcgtgagcgcgttgttgaccagctggcgcatattgatctcactctggcccaggcggtggcgaaaaatctcggtatcgaactgactgacgaccagctgaatatcaccccacctccggacgtcaacggtctgaaaaaggatccatccttaagtttgtacgccattcctgacggtgatgtgaaaggtcgcgtggtagcgattttacttaatgatgaagtgagaagcgcagaccttctggccattctcaaggcgctgaaggccaaaggcgttcatgccaaactgctctactcccgaatgggtgaagtgactgcggatgacggtacggtgttgcctatagccgctacctttgccggtgcacctagcctgacggtcgatgcggtcattgtcccttgcggcaatatcgcggatatcgctgacaacggcgatgccaactactacctgatggaagcctacaaacaccttaaaccgattgcgctggcgggtgacgcgcgcaagtttaaagcaacaatcaagatcgctgaccagggtgaagaagggattgtggaagctgacagcgctgacggtagttttatggatgaactgctaacgctgatggcagcacaccgcgtgtggagtcgcattcctaagattgacaaaattcctgcctgatgggaggcggcgcaattgcgccgcctcaaatgatttacatagtgcgctttgtttatgccggatgcggcgtgaacgccttatccggcctacaaaactgtgcaaattcaatatattgcaggaaacacgtaggcctgataagcgaagcgcatcaggcagttttgcgtttgtcagcagtctcaagcggcgcagttacgccgcctttgtaggaattaatcgccggatgcaaggttcacgccgcatctggcaaacatcctcacttacacatcccgataactccccaaccgataaccacgctgagcgatagcacctttcaagctcgcacttgtcaacacatccagctccgttaagcgtgggaaacagtaagcactctgacggatagtattatcgataaacgccggatgacacatcacctccaggctacgatcaccccgatggcctgcgtcatccagcacttgcaggaacaggctctcactgatctcttcaccgtagaatgcactgctgaatccctgggtagtgcgcaggttgaccggcaaatcaaacgccatctgacgatccgcccgcaacgcaatgccctgctctgccgcaaacctggcaacaatcgggaaaatctgcgggaacatatgcacatgatgatggctatcaagatgcgtaggtttgcgtccaaatagctcaatgaaacgcaaatactgactgacaagctcctgagtaatttcttccagcggtaaagcatcttcttctgccaactgccagatccattttcccagcacaccatcgcgggttaaccccggcatagctgtcagtggcttacccatagtaaggacaaagtgcatccctatggccagactcggttcatcacgactcaactgcaccgcatggtcaatagcctgcccattcaccagcgccgtcgtgctcgtgacaatcccattgcgacaggcctcgataatgccgtagttctgacctttgcttaagccaaaatcatcggcattaacaatcagtaagcgttccataatcagcctcggttaatgtgcttttttaagctctgcgatgcagtcggcaaagtttggcagccatttctcgtgcgccagaatcatctcgcgtgccagcagctcagcatcgcgatcggaatgcaccaacggactaaggtttagcgccagtaacacatcgttaaattctccgctaagtgcggcgttactggcagcaatctcgaagcctttaatggtgtgaatcagccccattactttatcatcgaaatgcgtaatgcgcggatgtggcgtcgcgccatcgcgccccagcttacaggtcatttctactgcccagtctgccggaatattatcaatctgcccatgatgcgggatattaacgtaatgttctgcttgcttgtcgttgtagatagcgttgatcacttcgcatgctgcatcagagtaataagccccaccgcgctgttccagttctttcggcttaactttcagctcaggatttttatacagctcaaaaagttgtttctcgactttctgtactacctgcgctcgtgcgccgcctttgtagtattcgcccatttcaatagccagcatctctttctgcttgaagtaatacagcagataagaacatggcagcagattcaagctacgaattaagccctcactaaatggcagatcgaaaatattttttacagaggacgcttttaactgcccactcgccacaccatcaagcaattcggcaaagcggctcttgccatttatcagcacatccttaatgaacaccatatggttgaggccgaacaaatcgatagataaatcatcgctgtctttcagcatcagaacatcgcgaataaacatcttcatgccgatcggaatattacacacgccgataaagcgtttaaatccggtatgacgataaacggcttcagtgaccattcccgccgggttagtgaagttaatcacccatgcattcggacaaagttcttcgacatcttttacgatgtcaaaaatcaccggaatggtacgcagacctttaaacaaaccgcccgcgccgttggtttcctgaccaagataaccatgacttaatggaatacgttcatccagttcacgcgccggtaattggccaacgcgcagttgggtagtaacgaaatcagcatctttcaatgcttcgcggcgatccagcgttttataaagcttcatcgggacgccagcgttatcaatcatccgttggcagagatcgaaaataatatccagtttcggtttaccaccttcgacatccaccagccataattcgctgaccggcaattcgtgataacgcttaataaatccttccagtaactccggggtatagctgctcccgccaccaatagtgacgacttttaatttctggctcataatttctcccttcagtacagaatactgatatctggcatatctgcccccccggacataaataatccagcaacaggacagatatgtgaattgtcaggtataacgacttactgattaaattcagtcaatttcttacgatagctcttaggcgtaaaggacgttaatttcttaaacgttttaataaacaaactcgggctactataaccggcctcaaacgcaatatccgtcacactatagttggtcatttccagttgttttttggcaaaattaatacggatttcattaataatctgcattggcgttttgccataatatcgttgagtcgctcgcgtcaaatattcctgacttttggcactcaacgccaccatattctccagcgcgctttcactaaactgctctttatcatgcatcttttctaccgtacttttcagccactgcggtacatcatcaatcacctgttcttcgcggtaatgacgtaaacggttaatgacataaaaagtaaccatctcaacaaactcttccagccctgtttcgcggaaattcaaactagaaatcactgtttccacataggtgagaaaagcgttattggtccggtatacctggctagcgacaaagcaataaggcaacaatggcaggtaatgctgctcaaaaaagcgtttactgatcccaacgttcaatatgcgcgtggcaccaaactcataaaaactttgatggtggctacctaacggaataaaaacaaaatcgccccgttccagtaacacgcgcttaccgttaatctcctggaaataacgcccggttaataccagagtaaattcataatagtcgtgctgatgcagtccgctgatactctcagttttgttatagataaacacatggaagtttttgccattaaacaactgctgttctcgggcagtggcaatttccggcgcgttaatcactggctgcatcatcgactccttatgccttcagtttttcatgaagctcaattaattcagtaatcagttcacgcgcaagcatggacgtcattaaatgatcctgagcgtggaccagcaccagactcactttcatcttaccttcgcccgcatcgccttcaatcagtttcgtctgtaccagatgcgcttcattcaatgccatccgactctgatccatcatggcttttgctgcggcaaaatcgccctgcttcgcctgtttcagtgccgcatacgccaggctgcgcgcttgtccggagttgatgatcagccccatcaccacttcttccagctcttcagcttccgtttgcgtatcgggaatgttatcgagatccatcatacatcgttcctctcttttcttaccggcacgattacccgtaccggcatcgattaaaatttcagggcgttagcgatatcttcttcgctctcttctttatcaatcgcattttgtgctttgttagccaccacaacaaagggcagataaattaacgttgcgatgccaaggttgaagagtgcgaccagcaatgcggcgacgctaccgttggtgttaaagaaggctcccagaccggttggcatggtccacggtgcaatattggtcaccggaggaataatgcccatgtagtacgctgcgagggtgattgccgccagaatcggttgtaccagtacaaacgggataaacatcaccgggttcatgataattggcagaccaaacagaatcggttcgttaatctggaagatgccggacggcagcgccagttttgccacctgacgataatcagcacggcgagaggcgataaagatagccaggatcaggcctaaagtcgcaccactgcccccaaggaaaataaaggagtccagcatcggcttggcccagatatggaaggtcttaccggctgccagcgccgcttcgacggaaccatattgctgataggtcgcgatattttccagtgcccacggcgtcataatgccgttgtccagtgcggtcagcgccagcgcgccatgaataccgaagaaccagagcagtggaacaaagatcacataggcccagcccaccacgctacccaagcttgccagtggggtactgatggtatccataatgatctgatggaagttggtgccccaggtattcaacgcccaggcaataatccccatcacggaaagaataataaagccgggaattaatgcgctgaaggaacggcttacactagcaggtacgctgtcgggcagtttaatgacccaattgcggcggacaataaaggtaaacatttctgccaccaccaggccaataataatcccggagatgatattcgccccacctaaccagtttgcaccaaccgcataggcctcaccgacactatatggggtgacggtcataaatgctgcaacggataacaacccagccgccagcgcatcgactttacgctcttctgccagcgccatgccaataaagaacggtgccattaaagacattattcctaatgttccgttatatacgttgccgccaatacctttcagaccattaagtgtttcaatggtactggcgtcgaggcgaatacctaaggaataaaaaaagctcccctccccaaagcttagaaaaacgttgttaattaatacaaacatggcccccgcaagggttaacggcattaagcgaataaagccatttttgattgcattaacgtgtggctgctttcctattttaactgcaaaagggaggagtaccttttcaaggcttgcaataacattactcatagaaaaatacccttaaaaaccgcaatttaaatattgcggtattgatttatgaaataactctttgacgggaaaatttaaaataaattaatttgctgcggcttttttaatcgctgcaaccgcagccttaagcacgcctaaaccatcgactttgccataaagcaggctgtcaattacttcaaccggtttgttgggtaacaaacgctggatttcgggcaacatataagcaatctgcggccctaataacacgacatcggcattctgacctttttcaccagccagtgtttccggaaatgcttcaataatgaccggaacttcatatttttctgcctgtgcgcgcattttacttaccagtaaagaggtagacatgcccgcagaacaaaacagataaatgtgtttcttttccataaaactgccctcatcgacgattatctgtcagccagacactccgcaagccttaacctgcttccatgctctgggtaacttgcgaaaccaacatgactttttttgtggctgaaaggagtatacggtatagacctgagcaatagtatttctttgaccttataaattgtttctccttgacctgtggttatgaccctcttcacatttcgggcaaataattcgcgaagataattaagaactcaggccaaaaaaaaccggcgcaatggccggtttccgttgttactcaagctttcagacgaattgattacttcgcagcctgtggatcagtgtcgtattcagcacaggtctgataaccggagttgatgacatatccggtatcatctaacgcgacaaagtaggtttctgctttaccatcacgttgacccaggatgtaggtctggcaagtaccgcgagcatggatcatgctcacttcagagctaggtttacccgcaatttgtgcaacctgcgcccggctcatgccttttttgacgtctttcaccacaggctgtacaaactggtctttggtacgatcataagccgtacaacccgccagcatggttaataccgccgctgcactcagaattcctgccatattcttgttcatattccgtcctcttgtttatcagcgtgttagataagcctggaatacattgggcgctttttcaagcccgtgaacgaaacggctccgctttcagaggattcctgtatgacgttttaaccaccattcagcccgctgtcgcttgtcgtttcagtagcaacgggttagctttaaggaagttttgtcttttctgtctggaggggttcaatgacattgcaacaacaaataataaaggcgctgggcgcaaaaccgcagattaatgctgaagaggaaattcgtcgtagtgtcgattttctgaaaagctacctgcaaacttatccgttcattaaaagtctggtgctcgggatcagcggcggtcaggactccacgcttgccggaaagctgtgccagatggcgattaatgagctgcgcctggaaaccggcaacgaaagtctgcaatttattgccgtacgcctgccctatggtgttcaggccgacgaacaagattgccaggatgccattgcctttattcaaccggatcgcgtattaaccgttaatatcaagggcgcggtattggccagcgaacaggcattgcgggaagcaggcattgaactgagcgattttgtccgtggcaatgaaaaagcgcgtgagcggatgaaagcacaatatagcattgcgggtatgaccagcggtgtcgtggtgggcaccgatcatgcagcagaagccattaccggattcttcactaaatatggtgacggcggtacggacattaatccgctgtatcgtctcaacaaacgtcagggtaaacagttactggcggcattagcttgcccggaacacctttataagaaagcgccaacggccgatctggaagatgatcgcccttctctgccagatgaagtggcactcggcgtgacctatgacaatatcgacgactatctggaagggaaaaacgtacctcaacaggtcgccagaacaatagagaactggtatctgaaaaccgaacataaacgccgtccgccaattaccgttttcgatgatttctggaaaaagtaataatttgcacatattggattgtgcgaaaaagagtaatttgttcacgccggatgcggcgtgaacgccttattcgacctataaaactatgcaaattcaatacattgcaggagtcgaataggcctgacaggcgtagcacgtcagacggtgtaacctttgtcatcgacccgcctcttttttaatcgcttcccgcctgttacactggatagataaccagcattcggagtcaacagtggtacggcgtttaacttctccgcggctcgaatttgaagctgcggcaatttatgaatatcccgaacatttacgtagtttccttaatgacttacccacccgaccaggggtgtatctgtttcatggtgaaagtgacaccatgccgctctatatcggcaaaagcgttaacatccgcagccgcgtcctttctcatttacgtaccccggatgaagccgccatgctacggcaatcccgacggatcagctggatatgtaccgccggtgaaatcggcgctctgctccttgaagcgcgattaatcaaagaacaacagccgctgtttaataaacggttgcgccgcaatcgccagctctgtgccctgcaattaaatgaaaagcgcgtcgatgtggtgtatgccaaagaggtggattttagtcgagcccccaacctgtttggcctgtttgccaataggcgcgcagctttgcaagcattgcagaccatcgctgatgaacaaaaactttgttatggcctgctgggactggaaccgttaagtcgcggtcgtgcatgttttcgtagtgcgctaaaacgttgcgccggagcatgctgcggtaaagagagccatgaggaacatgcgctacgcttgcgccagtctctggagcgtttgcgggtggtgtgttggccttggcaaggggcggtggcgctgaaagaacagcacccggaaatgactcaatatcatattattcaaaactggctgtggctgggggcggttaatagcctggaagaagcgacaacgttaattcggacacccgccgggtttgatcacgacggttataaaattctttgtaagccgctgctttccggtaactatgaaattactgaacttgatccggcgaatgaccagcgagccagttgattactgaacttgatccgggctatgaccagcgagccagttgatttcactgaacaacagtttaccttgcggttgtaaaagccgcagggtgtgcctgccatcgaaccagcacgcgccctggtcggtagtgagcaatttatcgcccagttgccacgccccgttaatcacaaacaccaccccgccgcgactgccaaaggtagtaaacgtacgttcggcaattctgactttcgccttacagacatccaggcgtgtcatgatgttgaaatccatgctcatctgccctgccgtcagtttcgcttttaccacctggtccgctgcaaaggcaaaaggctggaacggttttaaggtatggttaaagcggtctgcgctttcaaggagcatctcgccgccttccagcaacgtcactatcctttccatgccgggaaacaaagaaaactccccattcgccgcgatggatgcaatgctggcacgccagtaaaaatcacgttttgccggtgggaacgtgcaaatttcgcgcgtttcaccggcagcatttcgccacagattcacgctcattttacgcatatcaaagtattccatactcgctcccggcccgttcttttcattgttatcgttcaggtaaccgtggatggttatcggcaactcgggtgatttacgttagtggtgatcaggctttttttacaactgtttgagaagagaaaagaaaaccgccgatcctgtccaccgcattactgcaaggtagtggacaagaccggcggtcttaagttttttggctgaaagattattcagcagttgcaggcattttaccttttgccgctggacgttctgtcagacgcttctcaaaattagcattaaattgctttttctgttccggcgtcaggatgttgtaaattttgttctgggtttccatgtgcgccagcatgttagctttgcgctgttcttccatttttgcgatctgcgcttcagcttttactttatcgaaggtatcgctggcaatgatgtcatgcattgcgcggcgttcttccagcggcggacgtttcatctggtcacgctggcctttcatgatttcgcggatctgctgtttctgcgcgtcggtcaggttcaggtctttgaacatcatgtcctgatgcggaccgaacttgcctttgtggtgcatcatcggcttcgcgtcagccggtgctgcggtagtggtgtctgcggcatgggccaggttagccgcgccaagagccagggtagaggcaacaaacagtgcagttaatttacgcatattctatatccttcctttcagttatttattacggctttcttaagtagcgtgccgtgttgacgagattaactttactgactttagcgtcaattaatcagagcaacggtaaaacaatgaaagtgtaaaaaacacttttgcgccaattatggagaaaaaaagaaaatttgatggagagtgatgagagaatattacaacacgatgattttgcagagattatgaagaactataccggatgactggtgataaataaagcaaataaccaggattaatctgtattaatttataagaaagcaacttaatacccgcagaatgatttctgcgggtaagtattagcttattttttcgagcattaatcccgcgcgtaatcccaacgctaccaacggattagggaataacacatactctacatcatgggttacggtaaaacgttcctctccgtcctgcgccagcaatgttcctttctcaaacggcataaaattcagcgtgtcacttgccatatgcatttcgaaggacgggctgtggcgagtaatttggctaaccacccgataacggagcggcggtgttctcacgataccgacactctcaccagatagcagcgcagcaattgcgctggcagttactgcaaactggcgaagatcgttttgcccaaagggcaacgctttgccaagttccagcgtacaggccagcgcgccaaaatgtctggcgctgaaatgggtaaacgtaccaccaggttcctgatggaacaccagcgcctccagccccgccgcacccagccacgtcagaaatttctcgtcccagggaatgtcgcgttgcggtaatacaccgaactgcggatgcaaggagccacgaattgcggtatgtagatcaaggtgccagcgcacagattctttgccctggtcataaaaatcttccaggcactgttccagttcgcgcgcccgacaggtttctccgctttcagcaaatagctgccaacgaccgccaaacattcgattcatatcgctatggcaataacgtttcccttgcttcagcgcaggaggattcccgaggatcaccagcaaccgccaacgtaacgggatctcgccgtgagatatcgcgccaagcaacgcgtccagcatctccacaggtgccgtctcattaccgtgtattcccgcactaatcaccagtgcgccttgcggtggcgttaatggcgtcagttccagcacaccatcgcccagccagcgccagcgaacgccgttgatttctcgctcggtgataaccggttttttacccgttaaggtcagagcaagaaaattatccattgccccctccctcgcgctggaacggataaacgctaccgagattcagtaattggctcaatacatccagtgcttcccgcccttcgcgcagcaattgcgggtcggccagatcggcagcagtaaggcgatcgcggtagtaacgatccacccagtcattgagcgcattaaacagcgtatcgttcatcatcaccgccggattcaccgcccggcgttcttcttctgtcaataccacccgcaaccgcaggcacgccgggccgccgccattcgccatgctttcacgtaaatcaaagacttttagttcgctaatcgggttgtcagcggcaaggagttcattgagataaccccatactccggcgtgttcccgacactcctgaggcagcaccaacatcatggaaccatcatcgcggctcagcagttggctgttaaacagataggtagacaccgtatcagacacggaaacctgagttgccggaacttctatcgccataaaaccattgacccgcgcacgcaggtttgccagtaactgactctggcgagcgaacgcctgttggtggcaaaacagcacctggcggttactcacggcaatcacgtcattatgaaaaacgccctggtcgataacgtccgggttttgctgggcgaaaatcacctgttggggattcacctgattcagccttgccaccgcctcgctggcttcgcgagtctgtcgcgccggataacgggaaggccgggtatcattgccttcttctcgcccgtagacaaaaagttgcatacccggttcaccgtaatgaccgccgagacgattgtggtttgccgccccctcatcaccgagcaacgctacctgtggcaacgcgctatggacgctaaatttctcttcgtcgttaaaaatcgcttttaacaggctttcagtgacgggcgcttccaggctacggtgaaatttattgttcaggttggcaacggtgagatgcactttgccatccagcgtatcggcagatggcgcgatcgttgccgcattggctacccacattgggctagcggaactgacgctggaaagccagtgcggtgcctggcgtgcaactttttccagtacctgctcatcgctaccactgaatcccaactgacgcagcaccggaataaacggacgctcgtgcggcgggatcacggcctgggggaatcccgcatcggcaagggctttcattttcagtaagccctgcttcgccgccagtcgcgggttagacacctgaaaacggtgacgggtagaggcttcattaccaaagctcaggcccgcgtaatgatgcgtcagccctaccagcccgtcgaaattgacttcccaggcgttcatcgcaccacctcatcggaaaaatccagcccggggttaagcgtggcgggcaatgttaagctgtcgctctccaggctcgccatcggccatgcgcagtaatctgcggcataccaggcgctggggcgatggttaccggaagcaccaatgccgccgaatggcgcggtactggcagcaccggtaagcggtttgttccagttaacaatccccgcccgcgcctccagcaacagttgatcgaacttttcccgctcgggggaaaccagaccgcaagagagtccgaagcgagtgttattcgccattcgaatcgcttcatcgaaagtatcataacgccagacgcgcaataacggtccgaacacctcttcatctggtacgccagcaacgcctgtcatttcaatgatccccggcgtcagcaagcttgtccctgcttgtaataagcgcggcgcaagcaggggtcgtccgcccatcgcttccagttgctgccatgcagtaaccacctgctgtgcggcctgttcagaaatcagcccgccaataaacggctgcggttcgtcatcccagttgcccggcgttaatcgctggctgacggcaaccagacgagcaagaaacgcatcgccctgcgccccgcttttcagcaataaacggcgggcgcaggtgcagcgttgaccggctgtgacaaacgcgctctgaatggtcagatggacagccgcgtcgatatccgccacctcatcgataattagcggattattaccgcccatctcaagggcgagaattttctccggctgaccggagagctggcgatgcaactggtagcctgtattggcgctaccggtaaacagcaaaccgtcgagatcctccagcgcactcagcgcctgacccgtttcacgcccgccctgcaccaggttcagcacgcctggcggcaagccagcctgctgccataaacgcattaccgcttcgccactccacggtgtcagttcgctgggtttaaagataatggtgttacctgccagcaatgccggaacgatatgtccgttcggcaaatgaccagggaaattatacggcccaaacaccgccagcacgccgtgcgggcgatgtcgcaggctcgccgcgccgtccggcatttcactacgctgctcgccggtacgaacgtgatacgccttaatacttatcgcgattttattgatcatcgccgtcacttcggttgccgcttcccagcgcggcttacccgtttctctggcaataatcgcggttaattcggctttattgctttccagcagtgcggcaaagcgttcgacaacggcatgacgttcagcaaaactaagccgcgcccagcgcggaaacgccgcacgggctgcccgacaagcctgctcgacctgagcggcatcggcatcattgccttgccataacacctcgccgcttaccggattacgcttcacacggcttgcgccctggcccgttatccagtcaccgttaatccataaagtcatgctgttttctcctctgcgcacaggcgcaccagacgaacgcgatccccggcgtggcatttgagggcatccagttgtgcggcggttaaaatcaaacgctcggttgccggatcggtacgcaccagcaccacgcggaaatggtgataattttcattggcgaccaggcaggctgggaaatcgccctgcgcaggctgcccttctgccacttccaccagccgacttttacggatggcgcgcacgcggtcgatgtcacactcaagcgtcggcccaccgtcaaagatgtcgatatagttacggtagcgaaaaccttctttctccagcaccgcgcgggcaggcgcggtttgcggatgtacctgaccgatgacgtcctgggcttcctgggataaaaagtgggtatagatcggatgtttcggcatcagttctgcaataaatgccttttgcccggtgccgcagagaaaatcggcgcggctaaaatccatgctaaagaagcgtttaccgaggctttgccagaacggactatagccgtgttcgtcaatcaccccgcgcatttcagcaaccactttgtcattaaacttgtcgcgaaaagccgccataaacataaagcggcttttgctcagcaaatagccgttgccctctttgcgccagtccgggtcgagaaacagcgtgcacagctcgctgctgccggtgtgatcgttactgagaaacagcgtcggcaatgcgttatagacattcagctctttactggcgtgaaccaacgtgccgacgcgatagttgtaccagggatcgttcagcccaaccgccacctcaatggcacaaatccccgccacggtgcctgtctcgctatcttccagcacgaacacatagccctgctcacttttgggcagttcgccttgccaggttttgattgccctttcgatacgcgcgctaagcgtggcttcattggcgggaaggctcgtcaggccgccgcccgttttgctggcaagctgcatcagcgcgctgacatcacttcgctcaacgggacggatgaccatcatgatgaacctcggctaacaaattatttcaactactacctcggctaacaaagtgttcgcaagcagctgcaaagcgatccagtccggtcgtcacctcttcttcgctgacattgagcgcaggcgcaaaacgcaccacgttgccacccgcaatcagtaccatcacgcctgctttcgccgcttcctgagagatctgtttcgcttgcccggcgtaatcggcattcagtacacagccaatcagcaaacctaagccgcgaacttcactgaacaaaccatagcggtgattaatagtattaagacgctcaacaaaccagtcgtgacgctgtttaacgccattaagcatctctggtgtgttgatgagctccagcactttgcctgccaccgcgctggccagcggattaccgccataggtggtgccatgagtgccaacggtcatcacgcgggcgcactcttcggttgccaacaacgcaccgaccgggaaaccgccgcccagcgctttggcggtagttaacagatcaggcgtcacgccgtagtgcatataggcatacagttccccggtgcgcccgacgccggtttgtacttcatcaaaaatcaacagcgcattgtggcggttacacaattcacgcagaccttgtaaaaacgcgttgctggctggcaccacaccgccttccccctggatgggttcgacaatcaccgcacaggtagagtcgtcaatcagcgcgctggcagagttaatatcgttatatgcagcatgacgaatatccgccggcagtggcgcaaaatcctgactataggctggctgcccacccgcactgacagtaaacagcgtgcgaccatgaaacgcatttttgaacgccacgatgccgctcttatggctgccgtagcggtcgtgagcgaatttacgcgccagttttagcgccgcttcgttggcttccgcaccggagttacaaaagaagacgcgatcggcaaacgtggcgtcgatcaattttttcgccagtcgcagtaccggctcgttggtgtaaccgttgccggtatgccagaacttactcgcctgttcgttcagcgcttcacgcagttccggatgcgcatggcccagcgcgttcaccgcaatgccacccgcgaagtcgatatactctttcccctgctgatcccacaagcggctaccttcgccacgtaccggtataaagggtgccggagcgtaaacaggtatcatccattcatcaaagttttcacgcgtaattggctgagacatagcgacctctacagtaaataattcgttatttatatgttaataataagtaatgtttgcgctgtaaatgtagattgcagggttcgtgccagccagtgataaaagtgcataaacggcggaggctaactggaaatcaaggagttataaccaaaccatatgcatttaaagtgcatataaagtgaatacgtttgcgatgtgggtgaataaaaagaataaaaaacgcaatgttatgcagaagtaaaatataattctggaattgtgatcattgacgaaatttactggaaattactgcgccattctgacgcagcgcgcaccaaaagcgggcatttttttgcgccatcgttgacatcattaacaaccatcgatcaaatcacttaacaacaggcggtaagcaacgcgaaattctgctaccatccacgcactctttatctgaataaatggcagcgactatgaaatttgtctcttttaatatcaacggcctgcgcgccagacctcaccagcttgaagccatcgtcgaaaagcaccaaccggatgtgattggcctgcaggagacaaaagttcatgacgatatgtttccgctcgaagaggtggcgaagctcggctacaacgtgttttatcacgggcagaaaggccattatggcgtggcgctgctgaccaaagagacgccgattgccgtgcgtcgcggctttcccggtgacgacgaagaggcgcagcggcggattattatggcggaaatccccagtctgctgggtaatgtcaccgtgatcaacggttacttcccgcagggtgaaagccgcgaccatccgataaaattcccggcaaaagcgcagttttatcagaatctgcaaaactacctggaaaccgaactcaaacgtgataatccggtactgattatgggcgatatgaatatcagccctacagatctggatatcggcattggcgaagaaaaccgtaagcgctggctgcgtaccggtaaatgctctttcctgccggaagagcgcgaatggatggacaggctgatgagctgggggttggtcgataccttccgccatgcgaatccgcaaacagcagatcgtttcagttggtttgattaccgcagtaaaggttttgacgataaccgtggtctgcgcatcgacctgctgctcgccagccaaccgctggcagaatgttgcgtagaaaccggcatcgactatgaaatccgcagcatggaaaaaccgtccgatcacgcccccgtctgggcgaccttccgccgctaatttagcagctctcctggctcaaactgggtcaggagaattaaccttgagaaaaatcaacaaactgtcagtaatgatttgttgcctgccgtcctttgttataccgtctctgcgtttttagttgtctgaccacttctctattatcaagtttgatataggaaactccacgatgaacgctgagcgtaaatttctttttgcctgtcttatttttgcgctggtcatttacgctatccacgctttcggtttattcgatctgctcaccgatttaccccacttacagacactcatccgccagagcggatttttcggctatagcctctatattctgttattcatcattgccaccctcttgctgttaccaggaagcatactggtgatcgcgggaggaatagtttttggcccgctcttagggacactactcagtttaattgccgccacgctggcctccagctgcagtttcctgctggcgcgctggctgggacgtgatttactgctgaaatacgttggccatagcaataccttccaggccattgaaaaaggcattgcgcgtaacggtattgattttcttattctgacccgcttaatcccgttgtttccttacaatattcaaaattacgcttacggattaaccacaatcgccttctggccttatacccttattagcgcactcacgaccctacccggtattgttatttataccgtgatggcaagcgatctcgccaatgaaggcattacgctgcgctttattttacaactctgtctggcgggcctggcgctgtttattctcgtccagctcgcaaaactctacgcccgacacaaacatgtggatctgtctgctagccgccgcagcccacttactcacccaaaaaatgaaggataaaacgatgttgcaacattatagtgtgagttggaaaaaaggactggctgcactctgtttactggctgttgctgggcttagcggctgcgatcaacaagagaatgcggcggcaaaagtggaatacgacggacttagcaacagccaaccgctgcgtgtcgatgccaataaccatacggtaaccatgctggtgcaaattaatggtcgtttcctcaccgacgacactcgtcacggtattgtgtttaaagatggctccaacggacataaaagcctgtttatgggttatgcgaccccgaaagcattttatgaagccctgaaagaggcaggtggtacgccgggcgaaaacatgacgatggataataaagaaacgactcatgtcacaggcagcaaactggatattagcgtcaactggcaaggggcggcaaaagcgtattccttcgatgaagtgattgttgacagtaatggcaagaaactggacatgcgctttggcggtaatttaacggcagcagaagagaagaaaacgggttgcctggtgtgtctggatagctgcccggtcggcatcgtcagcaatgcaacatacacttatggtgcggttgaaaaacgtggtgaagttaaattcaaaggcaatgccagtgttctcccggcggataacacgctggcaacggttacctttaaaatcgccgaataaagccaggataaaggatgatgatgatgcaaagccgaaaaatctggtactaccgtataaccctcatcatcctgttgttcgctatgctgctggcatgggcgctgcttcccggcgtccatgagtttatcaatcgcagcgttgcggcgtttgccgccgtggaccaacagggtatagaacgctttattcagtcttacggcgcactggcggcagttgtcagcttcttgttgatgattttgcaggccattgctgcaccgctacctgcgtttttgatcacctttgccaatgcgagcctgtttggcgcgttctggggcggcttgctgagctggaccagtagcatggccggcgcggcgctgtgcttttttatcgccagagtgatgggccgcgaagtggtggaaaaattaaccggcaaaaccgtgcttgacagtatggacggctttttcactcgctacggcaaacacaccattctggtctgtcggttattgccttttgtccctttcgatccaatcagctatgctgccggtttgactagtatacgttttcgcagcttttttatcgccaccgggcttggtcagttaccggcaactattgtttattcctgggcgggcagcatgttaacaggcggtactttctggtttgtcaccggactgtttattctgtttgccctgaccgtggtgatttttatggcgaagaaaatatggcttgaacgccagaagaggaatgcctgatgggtttaccgccgcttagcaaaattcctttaattttacgtccacaggcgtggctgcatcgtcgccattacggcgaggtgctaagccccattcgctggtgggggcggatcccgtttatcttttatctggtgagcatgtttgttggctggctggagcgcaaacgcagtccgctcgatccggtagtacgaagccttgtcagcgcgcgcattgcgcaaatgtgcctgtgtgagttttgtgtggatatcaccagtatgaaagtcgccgagcgcaccggcagcagcgataaactgctggcagtggctgactggcggcaaagcccgctctttagcgatgaagaacggctggcgctggagtacgccgaagccgcaagcgtaacgccgccaacggtcgatgatgccctgcgtacccgactggctgcgcattttgacgctcaggcgctcaccgaactgacggcattgatcggcctgcaaaatctgagtgcccgttttaattctgccatggacattcccgctcaggggctgtgccgtattcctgaaaaacgttcttaaggagagatgatgcgccattgtgggtggttgctgggattgttaagcctgttttctctggcaacacatgccagtgactggcaagaaattaaaaatgaggccaaagggcaaaccgtctggtttaacgcctggggcggcgataccgcaattaaccgctatctcgactgggtgagcggcgagatgaaaacccattacgctataaacctgaagattgtccgtctggcggatgccgcagacgcggtgaagcgcattcagaccgaagccgcagccggacgtaaaacgggcggcagcgtggatctgctctgggtgaacggcgaaaacttccgcaccttaaaagaggccaatttattacaaacgggctgggcggagactctgcccaactggcgctatgtcgacacacagctgccggtgcgggaagatttttctgtgccgacacaaggtgcggaaagcccctggggcggcgcacaactgacgtttatcgcccgccgcgatgttacgccacagccaccacaaacgccgcaagccttactggagtttgctaaagccaatcccggcacggttacctatccgcgcccaccggactttaccggcacggcgtttcttgaacagttgctgattatgctgacgcccgatcccgccgcattaaaagaagcgccggacgatgcgactttcgcccgtgtcactgctcccttgtggcaatatcttgatgtgctgcatccgtatttgtggcgcgaaggaaaggatttcccgcctagtcccgcgcggatggatgctctgctgaaagccggcacattgcgcctgagcctgacctttaaccccgcgcatgcgcagcaaaaaatcgccagcggcgatttgcctgcaagcagttacagttttggctttcgcgaggggatgattggcaacgtgcatttcgtcaccattcctgccaacgcgaatgccagtgctgcggcgaaggtagttgccaatttcctgctcagtcccgatgcgcaactgcgtaaagcagatcccgctgtctggggcgatccttctgttctcgatccgcaaaaactgcctgacgggcagcgcgaaagtttgcaaagtagaatgccgcaggatctgccgccggtactggctgaaccgcacgcaggttgggtaaatgcgctggaacaagaatggctacaccgttacggtacgcattaatctttttgctgtgggcgatggtggcggtgatttatgcaccgctgatcccggcagctctcacgctgataagccctgctttgagcttgacacactggcaggcgttatttgccgatccacagttaccgcaggcattactggcaacgctggtgagcacaaccatcgcggcggtcggggcattgttgattgccctgctggtgattgtggcgctgtggcctgggccgaaatggcagcgtatgtgcgcccgtctgccgtggctgctcgccattccccatgtggcttttgccaccagcgcccttctgctctttgctgacggagggctgctttatgactatttcccgtatttcactccgccaatggaccgatttggcatcggtctgggcctcacccttgcagtgaaagaaagcgcatttctgctgtggatcttagcagcagtattgagcgaaaaatggctgttgcagcaggtcattgtgctggatagcctgggctacagccgctggcaatgcctgaactggctgctgttgccctccgtcgcgcctgcgctggcaatggcgatgctggcgattgttgcctggagcctgagcgtcgtggatgtggcaattattctcgggccaggtaatcccccgacgctggcggtaattagctggcagtggttaacccagggcgacattgaccaacaaacaaaaggcgcgcttgccagcctgctgttgatgctgttactcgccgcctacgttttgctgagctatctgctatggcgcagctggcggcgcactattccccgcgtagatggcgttcgcaagcctgccacgcctttattgccgggcaatacgctggcgatttttttacccttaaccggtgtgctgtgtgtggttctgctggcgatcctcgcggatcagagcacgatcaatagtgaagcgctcatcaacagcctgacaatggggctggtggcgacattcatcgctttgctcctgttactgctgtggctggaatgggggccacagcgtcgccagttgtggctatggttgcccattttattacctgctctgccactggtggcgggccagtacacgctggcgctatggctgaaactggatggaagctggacggcggtggtctgggggcatctgctgtgggtgatgccgtggatgctgtttatcctgcaacccgcctggcagcgcattgatagtcggttaattttgattgcgcaaacactgggctggagccgggccaaaatcttcttttacgtgaaatgcccactcatgttgcgccctgtgctgattgccttcgcggtgggatttgcagtcggtattgcgcagtatatgccaacgctgtggctgggcgcggggcgttttccgacgctcaccactgaggcggtggcattaagcagcggcggcagcaacggtattctcgccgcccaggctttatggcaactgctattaccgcttattatttttgccctgaccgcgttagtcgcaaaatgggtaggttatgtcagacaaggactccgctaatgctctgcgtgaaaaatgttagcctacgtttaccagaaagccgcttgctgacaaacgttaactttacggtggataaaggtgacattgtcacgttaatggggccgtctggctgtggaaaatccactctgtttagttggatgattggtgcactggccgaacagttttcttgtacaggtgagctatggctcaatgagcaacggattgacatcctacccaccgcacagcgtcagattggcattctttttcaggatgcactgttatttgaccagttcagtgtcgggcaaaatttactgctggcgctaccggcgacacttaaagggaatgcccgacgtaatgccgtgaatgatgcacttgagcgtagtggccttgagggagctttccatcaggatcctgccactttgtctggcggtcagcgagcgcgcgttgctctactacgcgcccttctcgcccaaccaaaagcgttactcctggatgagccattcagccgtcttgatgtggctctgcgcgataattttcgccagtgggtgttcagcgaagttcgcgccctggcgatccccgtcgttcaggtaacgcacgatctccaggatgttcctgctgatagttctgttctggatatggcgcagtggagtgaaaattacaacaaactgcgataacgcaaagtttttctcaatgcgtcagttcagaatggcgcactcaaaactacaatgtcgggattttcgatgaaacgtgtttctcaaatgaccgcgctggcaatggctttagggctggcttgcgcttctagctgggccgctgaactggcgaagcctcttacacttgaccagcttcaacaacaaaatggcaaagcgatagatactcgccccagcgcgttttataacggctggccacaaaccttaaatggcccttctggtcatgaacttgccgccttaaacctctctgccagctggcttgacaaaatgagcaccgaacagctcaacgcgtggatcaagcaacataacctgaaaaccgatgctccggtggcgctgtacggtaatgacaaagatgtcgacgccgtcaaaacgcgactgcaaaaagcaggtttaacgcatatctccatcctgagtgacgcgctaagcgaaccttcccgtctgcaaaaactgccgcattttgagcagctggtttatccgcaatggctgcacgacctgcaacaaggtaaagaggttacggcgaaacctgccggtgactggaaagtcattgaagcggcctggggcgctcctaagctttaccttatcagccatattcccggcgctgactacatcgataccaacgaagtggaaagtgaaccgctgtggaacaaagtttctgatgaacaactaaaagcgatgctggcaaaacacggcattcgccatgacaccacggtcattctgtatgggcgtgacgtatacgctgcagcgcgtgtggcgcagattatgctttatgctggtgtgaaagatgtgcgcctgctggatggcggctggcaaacctggtccgacgcgggactgcctgttgagcgcggaacgccaccgaaagtgaaagcggaaccggatttcggcgtgaagatcccggcacaaccgcagttgatgctcgatatggaacaggcccgtggactgctgcatcgccaggatgcaagcctggtgagcattcgtagctggccagaatttatcggtacgaccagcggttacagctatattaaaccaaaaggtgaaatagccggcgcacgttggggacacgctggtagcgacagcacgcatatggaagattttcataacccggatggcaccatgcgcagcgccgatgatattaccgctatgtggaaagcgtggaatatcaaaccagagcagcaagttagtttctactgcggcaccggctggcgcgcgtccgaaacctttatgtacgcacgcgccatgggttggaagaatgtttccgtgtatgacggcggctggtacgaatggagcagcgatccaaaaaatccggtagcaaccggtgaacgcggcccggacagtagcaaataacattgcaattactgacgctggaggctcttcagcgtcagatacccactccacacccgcgtaaaggtcgtcatccagcacaacgcaccgaagatccacgcaaaccacgcaaaccatgcagggaataaacatcccagcacaaacagtaagatcgtttctgtgccttcggttaatccccccagatagtaaaagctcttatgtgcataaccggggttatcaatctgatgttttgctgccagtgcagcaaaggcgagaaaactgctgcccgtgccgataaacgcaaacaacaaccagccgcctgccagcgcattttgctccggtgcagcaagaataaagccaaacggcaccagcgcgtaaaagagaaaatcgagagaaatatcaagaaagccgcccgcgtcggtaagctctctgcgccgcgccagcgcaccgtccagaccatcaagcagcctgttcaacaaaatgacgactagcgccgccagataccagcccagcgccagaaacggcagagccagcacgccgatggcaaatcccactaatgttaaaccatctggcgtaatgcccggtttatcaagaacccgcacgcactgatgcaacaacggtttaatccggggatgaagatggcggtctagcacaggcactccttaaatataaagcctttctgattgagcaacagtgcggatattatggcatttttcgcttatctgcccgtgtgtaatttatgaaaatgattgaagttgttgccgccatcattgaacgtgatggcaaaattttactcgcgcaacgccccgcccagagcgatcaggcgggattatgggagtttgccggtggtaaagtcgagccggatgaaagtcagcggcaggcgctggtgcgtgagttacgcgaagaactgggcatcgaagcaactgtgggtgaatatgttgccagccatcagcgagaagttagcgggcggattatccatcttcatgcctggcacgtacccgacttccacgggacgttacaggcacatgaacatcaggcgctggtctggtgcagtcctgaagaggcgctgcaatatccgctggcccctgctgacattccattattagaggcgtttatggctttacgcgccgccagaccagcggattaattatggctttacgcgccgccagaccagcggattagtgctaagggttttgtcatcacgctggcattgcagcagtattccttcggctttaattaccgccccttcagaataattttgatcctgataaacgcagcactgagtacagggctgcgcactctgcccgccactactgaacacttctggcggtacgtttacctccacgtccggacgataatgcgggttagccagtgcaattaatggaaatgctaatactacggcgaacaatgctcgactcacagggaactccttaacgttattgtctctgctactgataacggtagccgggtggcaaaactttagcgtctgagttatcgcatttggttatgagattactctcgttattaatttgctttcctgggtcatttttttcttgcttaccgtcacattcttgatggtatagtcgaaaactgcaaaagcacatgacataaacaacataagcacaatcgtattaatatataagggttttatatctatggatcagacatattctctggagagtttcctcaaccatgtccaaaagcgcgacccgaatcaaaccgagttcgcgcaagccgttcgtgaagtaatgaccacactctggccttttcttgaacaaaatccaaaatatcgccagatgagtttactggagcgtctggttgaaccggagcgcgtgatccagtttcgcgtggtatgggttgatgatcgcaaccagatacaggtcaaccgtgcatggcgtgtgcagttcagctctgccatcggcccgtacaaaggcggtatgcgcttccatccgagtgttaacctttccattctcaaattcctcggctttgaacaaaccttcaaaaatgccctgactactctgccgatgggcggtggtaaaggcggcagcgatttcgatccgaaaggaaaaagcgaaggtgaagtgatgcgtttttgccaggcgctgatgactgaactgtatcgccacctgggcgcggataccgacgttccggcaggtgatatcggggttggtggtcgtgaagtcggctttatggcggggatgatgaaaaagctctccaacaataccgcctgcgtcttcaccggtaagggccttagttttggcggcagtcttattcgcccggaagctaccggctacggtctggtttatttcacagaagcaatgctaaaacgccacggtatgggttttgaagggatgcgcgtttccgtttctggctccggcaacgtcgcccagtacgctatcgaaaaagcgatggaatttggtgctcgtgtgatcactgcgagtgactccagcggcactgtagttgatgaaagcggattcacgaaagagaaactggcacgtcttatcgaaatcaaagccagccgcgatggtcgagtggcagattacgccaaagaatttggtctggtctatctcgaaggccaacagccgtggtctctaccggttgatatcgccctgccttgcgccacccagaatgaactggatgttgacgccgcgcatcagcttatcgctaatggcgttaaagccgtcgccgaaggggcaaatatgccgaccaccatcgaagcgactgaactgttccagcaggcaggcgtactatttgcaccgggtaaagcggctaatgctggtggcgtcgctacaagcggcctggaaatggcacaaaacgctgcgcgcctgggctggaaagccgagaaagttgacgcacgtttgcatcacatcatgctggatatccaccatgcctgtgttgagcatggtggtgaaggtgagcaaaccaactacgtgcagggcgcgaacattgccggttttgtgaaggttgccgatgcgatgctggcgcagggtgtgatttaagttgtaaatgcctgatggcgctacgcttatcaggcctacaaatgggcacaattcattgcagttacgctctaatgtaggccgggcaagcgcagcgcccccggcaaaatttcaggcgtttaactgtatttaacggaacttgctccccacggaacatttcttatgggccaacggcatttcttactgtagtgctcccaaaactgcttgtcgtaacgataacacgcttcaagttcagcatccgttaactttctgcgatagcagcagatatgccagtaaagaaatcccatttgactatttttttgataatcttcttcgctttcgaacaactcgtgcgcctttcgagaagcaagcattatataatgccaggccagttcttcttcaattgtcccgttttgaaaagctgtgctacttatgctgatcatccaacttaattccgccgcccatattagcttcgcgctggatttaccggagctatgattagcgcaatcagagatatagtcactgggaaaaacagcaaatttattcaacaaggcgataacctgctctggggcttcctccatgtttgctttaaaggtattggctccatggtcgccagaaagaaaatgctccattaaggcacaataactttcgctatcttcgataccccattgatcctctaaagactcgcgtcttttacttatgatatcgatgctgtcaaaaggaagcacatgatattggaaggtatctttgccaggttcaggctttcgcggccagaactccagcgtttcagaccattgcttatgatagaatcgataaggtgcgatcaattgtagcgcctgtaacttctcgatactgagcggctcaatacctttagcctgataataatgcagttgttctttttttgctttaaaaccggcccgaacaataagccccatcataattaatagataaagaaaagagcatcccgcggtaatcaggcctctttcattcaaaccgttggatgttatcgctgcgaacacaaacattacagcgacaacacatgttaaataaaacccccacttacaaagcagcatggccttattttctttaatcatccgttcaaaattactattaaatatttcccagccattaaaagaatacttctcgctcccaggatggttttgtaataaaacttttttcatcacattccctgttattacatactttagaggcgataattttatccatgcaaaaaaaatatccaacgaattttcttgatccgctggatatttcagaatatgactcgaatagcacgaaagattcactcgcttacgctatcgccccgcttccgacttcatctgctggcggactttttttcgcactacgtttacgcggtgcagcctttttcttatcagcactgccaccactgcccggagccacaatgccgcgaaactgccgcaccggcgtacgtttggcttgatcaataagctgatatagcgtccccaccagcggctgcataaagtcctgatagcgacactgcttttcgctgatttgcgtcagcacgctttcccagtgcgcggtcatgtccggtcgcgtcgccatctccggcaggctatggaatagcgcttttccggcgtcggtggagtggatatagcgcccttttttggtcaggaaaccacgcttgaacaacagttcaataatcccggcacgcgttgcctctgtccccagaccatcggtcgcacggaggatctttttcagatctttatcctgcacaaagcgcgcgatcccggtcatcgcgctaagcagtgttgcatcggtaaaatggcgcggcggctgggtttgccgctctaccacttcacctttttcacacagcaactcatcgcctttcgccaccacaggcagtggcgtgccgtcgttttcttcatcgcgctctttgctgcctaacagcgtgcgccagcctgcttcagcaagaaaacgcgctttagcgacaaatttgcctttggcaatgtccagttcgataacacacttgcggaacaccgcatccgggcagaattgcatcagatactgacgggcaatcaggttatagaccttcgcttcgttctccgtcaggttgatcgcagaactccgtgcggtcggaatgatggcgtggtgcgcatcgacctttttgtcatcccaacagcggttgcgtatatctggatctaccactggctgcggcaacagatccggtgcatgaacactgatggcattcatcaccgcgtggcgtccggcaaaatgttcttctggcaaatagcgacaatcagaacgcggataagtgattagcttgtgcgtttcgtacagtttctggcagatatcaagcacgttctgcgcactcagaccaaaacgttttgccgcttcaatctgcaacgcactaaggctaaaaggcagcggcgcggattcactttcccgtttatcgttatagctggtgacaatagccggttgaccactaatgcggttaaccacatgctccgccagtggacgatgtaacaagcgcccttcttcatcctggtacggttcacacgcttcgctcggttgccagatagcggtaaaccgctcatcggcaggtgtcacgatatgtgctttgacttcaaagaagtctttcgccacgaagttttcaatctcttcatcgcggcgcaccaccagcccaagcacgggcgtctgcacgcgtcccacggaaagtacgccctgataaccggcattgcgaccgagaatggtatacgcacgggtcatattgatgccgtacagccagtcggcacgcgctcgcgccagcgcagaaacgcacagcggtacaaactcactgttggaacgaagacggtcgatcgcccgctcaaccgcctgcgggttcaggtcgtttatcaagcaacgctgtacctgctggcgcttttccggtgccagttgcagatagtccagcacttcatccaccagcaattgcccttcacgatccgggtccccggcgtgaacgatttcgctggcttcatgcaggaaccgtttgatgacgttaagttgtttggtcacggagggtcggggctgtaattgccacttttccgggacaatcggcaaatccgcaagattccagcgcgcatagcggctgtcgtaggcgtctggctgcgcctgctcaagcaggtgaccgatacaccaggtcaccacctgaccattaccgcactcgataaagccatcgcctttccggtgcggtttgggcaggacatcagcaatggcgcgcgccagactcggtttttcggcaataaacaaccgcattgaattaacgaatctcaaccatggcacgaccgccgcgcgctggcaccagttcgccaattgccgtcagttcaatgccaaactcggcggctgtagctttgacctcattttctgcttccggcatgaccgccagcagcaaaccgccagaagtttgcggatcacacagcagatcgcgcacttcacgcggcatttcacccatcagatgaccgtagctggcaaagttacgttcagtgccgccaggtactgcgcccaacttaatgtactcttcaacaccggggagtttcgggatcgcttcatagtcgacgcgtgcctgcacaccagccccctgacacatttcgctcaagtggcccagcagaccaaagcccgtaacgtcggtcatcgcttttacgccttcgatgttggcaaaggacgcgcctgcgatgttcatccggcacatcacttccgtcgccagtccctgatgttctggtttcaacagactttttttctcagccgtggtaagaacgccgatccccagcggtttcgtcaggaacagtttgcatccggcttgtgcggtactgtttttcttcacccgctcggtcggtacgatccccgttaccgccagaccaaaaatcggctccggcgcatcgatggagtgaccgccagccagcgcaatacccgcctgacgacatgcatagcgtccaccttcggtcacttcgcgggcaatttctggggaaagtttgttaatcggccagccgaggatcgcaatcgccataatcggtttgccccccatcgcgaagatatcgctgatggcgttagtcgccgcaatgcggccaaaatcgaaaggattatcaacgatcggcataaagaagtcggtggtactgataacgctggtgccattgcccagatcgtacaccgccgcatcgtcgcgggtttcattacccacaagcaaattcggatcaacaaacttcgcctgctcactatgcaggatggtttccaacacttttggggaaattttacagccgcaaccagctccgtggctgtattgggtcaaacgaatgctgttctcgctcatggacatctcctgtcaatgcaatccgggtatggtaaccctcattccgtgaagtgataagtgagagtgtctgaattcctgcgcctttgctcacaatccagacagtttcgcgacaattatcagaaataagttacaaacggcgtcgggtccgggacgttaatgctcgtagatgctttcagctgcggcgtaccgaggtagagaaaaccgacaattttatcctgctcacggcaaccgaatgcttcacgcactaccggactttcagttaatgcgccactgcgccagatgccgccaaacccctgggcaactgctgccatttgcatcgccatgaccgcgcatccggcagacatttcctgttcccagcgcgggactttatgattctcttcgcatttcgccaccaccgtgatgatgagcggtgcgcggaacggcgcattacgggctttgtcgatagctttgtcatcactaccggcagcaatcgccccctgttccagtacggcgctgaaacgctcgcgcccttccccttcaatcacaaaaaaatgccacggttgcatggacttatggtccggcgcacgcatacccgcacgcaggatgttttgcagttgttcacccgttggcgcgggttcagccaagcgggaggcgctacggcgattgatcaatagttcgagtgcatccatttgattaactcctgtcgtgatatttattcacaaaattaacacgagagtggattttgttacagcacagtccgcaattcctgctgacaagtaccggttgggtcattacgataaccacatctattgcgcctgtgacaggtgtgaccttaagttgggagaatacatgcgaaccctttggcgatttattgccggattttttaaatggacgtggcgtctgctgaatttcgtccgtgaaatggtacttaacctgttctttattttcctcgtactggttggtgtggggatttggatgcaggtcagtggtggtgatagcaaagaaacggccagtcgtggcgcactgctgctggacatttctggtgtgatcgtcgataaacccgacagttctcagcggtttagtaaattaagccgccagctgcttggtgccagttccgatcgtctgcaggaaaacagtctgtttgatatcgtcaacactattcgccaggcgaaggacgaccgcaatatcaccggtattgtgatggatctgaaaaacttcgcaggcggcgaccaaccgtctatgcagtacatcggcaaagctctgaaagagtttcgtgacagcgggaaaccggtttatgccgttggcgagaactacagccaggggcaatattatctcgccagtttcgccaataaaatttggctgtctccgcaaggcgtggttgatctgcacggctttgccaccaacggtctgtactacaaaagcttgctggataagctgaaagtttccacccatgtgttccgcgtgggtacgtataaatctgccgttgaaccgtttattcgtgatgatatgagtccggcagcccgcgaagctgacagccgctggattggtgagctgtggcaaaactatctgaatactgttgccgctaaccggcagatccctgctgagcaggtattccctggcgcgcaagggttgcttgagggtttaaccaaaaccggtggcgataccgcgaaatatgcactggaaaacaagctggtcgatgcactggcaagcagtgcggaaatcgaaaaagcactgaccaaagaattcggctggagtaagactgataaaaattatcgcgccatcagttattacgattacgcattgaaaacgccggcagataccggtgacagcatcggtgtcgtctttgctaatggcgcaattatggatggcgaggaaactcaggggaatgttggcggtgataccactgcggcacaaatccgcgacgctcgccttgacccgaaagtgaaagcgattgtcctgcgtgttaatagcccaggcggcagcgttaccgcgtctgaagtgattcgcgctgaactggcagcagcccgggcagcgggtaagcctgtggttgtaagcatgggcggcatggcggcatctggtggttactggatttccacgccagctaattacattgtggctaaccccagcaccctgaccggttctatcggtatcttcggcgtgatcaccaccgtagaaaatagtctggatagcattggtgttcatactgatggtgtcagtactagtccgctggcggatgtttctatcaccagggcactgccgccggaagcgcagctgatgatgcagttaagcattgagaatggctataaacgctttatcacgctggttgctgatgcgcgtcatagcacgccggagcagattgataaaattgcccagggccacgtctggaccggtcaggatgcaaaagctaacgggctggtcgatagtctcggggatttcgatgatgcggtcgccaaagcagcagagctggcaaaagtgaaacagtggcatctggaatattacgttgatgaaccgaccttcttcgacaaagtgatggacaacatgtctggttctgtccgggcaatgttgccagatgcgttccaggccatgttacctgcaccgctggccagcgtagcctctaccgttaaaagtgaaagtgacaagctggccgcgtttaatgacccacaaaaccgttatgcgttttgcctgacctgcgccaacatgcgttaagtcttgtactgagtggccgacagatcgtcggccacattattttttacgtcgacgaatcctcttcccgctgtttcgccccatatttccttatccgcatagtatcaggtgcgctccccctgcctcacgtatatacttttgctctttcgatatcattcatatcaatatcatgcaaaagaaaagtatttacgttgcctacacgggcgggaccatcgggatgcagcgttccgagcagggttatataccggtgagtggtcatctacaacgccaactggcgctgatgccggaattccatcgcccggagatgccagatttcaccattcatgaatatacgccgctgatggattctagtgatatgacgccggaagactggcagcatattgctgaagatattaaagcgcactatgacgactatgatggttttgtcattctgcacggcaccgacacgatggcgtataccgcctctgcgctgagcttcatgctcgagaatctcggtaaaccggtcattgtgacagggagtcaaatcccgctggctgagttacgctctgacggacaaattaatctgctgaatgcgttgtacgttgcggcgaattatccgatcaacgaagtaacgctctttttcaataaccgattgtatcgcggcaaccgcactaccaaagcccatgccgatggttttgatgcgtttgcctctccaaaccttcctccgttactggaagcaggtatccatattcgtcgtttgaatacgccacccgccccgcacggtgaaggggaattaatcgttcatccaatcaccccacaaccaattggcgtagtgacgatttatccagggatttctgctgacgtcgtgcgcaattttctgcgccaaccggtgaaagcattgattctgcgctcctatggcgtgggtaatgcgccacaaaacaaagccttcctgcaggaattacaagaagccagcgatcgcggtattgtggtggtcaacctgacacaatgtatgtccggtaaagtgaacatgggtggttatgccaccggtaacgccctcgcccatgccggcgtaattggcggtgcagatatgactgtagaagccacgctaaccaaactgcattacctgcttagccaggaactggatactgaaaccattcgcaaggccatgagccaaaacctgcgcggcgaactgacgccggatgattaaggagactgtaatgccccctcgcgccctgttactggtcgatttacaaaatgatttctgtgctggtggcgcgctcgccgtgccggaaggtgacagtacggtggatgtcgctaaccgcctgattgactggtgccagagccgcggtgaagcggttatcgccagtcaggactggcacccggcgaatcacggcagttttgccagtcagcacggtgtagagccttatacgccaggccaactcgacggtttgccacaaaccttctggccagatcactgtgtgcagaacagtgaaggcgcacaattacatccgttactgcaccaaaaagcgatcgcagcggtgttccataaaggcgaaaatcctttagttgacagttacagtgccttttttgataacggccgtcggcagaaaacctctctcgatgactggttacgcgatcatgaaatcgatgaattgatcgttatgggcctggctactgactattgcgtgaagtttaccgtgctggacgcgttacagttaggttataaggtaaacgtgattaccgatggttgtcgtggcgtgaatatccagccccaggacagtgcgcacgcgtttatggagatgagtgcagctggggcaacgctatatacgctggcagactgggaagagacacaggggtaattttacgctggcctacaattctgtactggcattgtaggccaaataaaacacgtcagtggcacatctggcaattgatgccatcaacgaaagatttaattcacctcagaaatctcttccaagctcaccttccgcgtttcgatgccaaaaatggagagaaccagcgcacagagcaataacataacaccaagtaccataaacaccgtgatgctcccataatgtgttaataatgccgcaacgccatagggcgtgaagactgcgacgatccgtccgacggcattaacgaaaccgctaccgcgcaggcgtaaatgcgttggccaaagctccgggatataaaccgcgctcgcgaagcaaacatacatgtataaaaagaagatcatcaccagtccatagattaaaatcgcccactctgtagtctgaatactatagatatagcctaacacggcaataataataagtaaggtggagccaaataaccgacgaggaaaatgatcaataattaatgccgcaataaatattcctaccggagcgccaatcataataacagcggtcattaatatacttttatcgacatcaatgccggagttaacaaatatggtcggtatccatacggtgatggtataaaggctaatgttcattgcaattaaaacagtaatcgcgactaatgtacgtcgtaacatttcacctttaaacaggagccagaaagtacccttgattactttaaccttgctgttgctctgatagctagtaagcgggggtaaacgaatactcttctctctttcaatttgctgctctacttcacgaagttggcattctgcacctgcgatttgccctttccctgccagccatcgtgggctctcgataaagtatttaccactgagaaaccaggctaacagtatgccaataccacccagcagaaacattattcgccaactaaaaaaagcgataaccaccacgcctatcgccgcagacagcatggggctccagttaccaacaaaactgagccgcgcggaccattttccacgcaccgtcgcggggataaactccgtaaaactggcatagccaaccataatcagcgcccccattcctgttcccatcaggaagcgaaagaagatgagccagtacatatcagggacaaaagcggcccctgttgcagcaataccgacgatgagaagatttatgcgaaacgccctgcgccgcccaaagtagtcaccaataaacccaccagtaagactgccgatgaaataaccaaacattaatgcgctggtaaaggcggcattgaggaaattattactccatccattgcttaccagctttgctaagacgacattaccggagtaactcaaaaaccctgttaataacagactaaagcttataataccaaatatacgataatgaaaccgggccaaaggcaagcggtccagtcttgcgccaatttgatcatattgttccattaggtgcctcggatttgctaaaaaggtagcaattgcggcaaattcacttgccgcatctttatcatcattttatttcaaggcgcaggaacaaataatattgacaacgtgtgcttaaattaccacaccagctggatattattgtctttgcaaaatgctatccactctgcacccggacttttatcagttattatgtaattaatatgactaaaatcagctaactggacaaaagctttgcgatcaaacttagagtgatcaaccaataacgcaacttctgtcgcctgacggatcattgtctttttgatttcagcttccgcttcattagagtccagcgcgccgctgttaatatcaagacctttacaactcattaccatgatatcgacatgatagcgcctgatgatctctttagtaattcttccttgcagactaagtgtatttttgtttagttccccacccgtactaacgactttaatttcactctgagccagaacatgaatcgcttccgcgctgttggttagcaacgtcaggccactacggtcctgtaacaatttgagcaattccattacggtactactggaatcggctgccatggtggttttattgtcgataaagggtagtgccttgcgtgcaataagctgcttctcttcataaaagctactagcgcgcttataaaaatggatattctccgtcaacatcgctgtatttaaaacagcaccaccataggttctggtcaaaaagccttcatcttccagcttctcaagatcgcggcgaatggtttcttcggttacctgaaaaatcccactcaaattactgactgtcacctttttatcgttggcaaccatttgcttaattgcctgaatcctgtcttttgccgccacgattacacccctgtatctttttacatcacattagcgcgattatcgcataaccgatgtttactttcaaaataacctgtttgaatcacagattttcatcacagttttcacagaaacagaggtgaatcgtgttgagtatttaacgctccagggcctctgccatttccctcatcaatgttgcgtctgcatcgcttaagttgatattcagtgccgcgacattttcgcgtacctgttccggtgcagtagccccactaagaatggagattaaatcactctgttttaatatccacgccagtgccagagtgggaattgtgcactgataacgagcacaaagtggctgccactgttcaagcatatcaatcactttcagcatgttttcacgctggaaccagactttatttgcccgagcgccgcccggaacgtaatcacgagtgatggtgccggtcaacaatccctgctctagcggggaataaacctgaaccacaatgccattatcacgacatagtggcagcagttcgttttccattgcccggtcgaggatactgtatttcgcctgaataatatccagttcaccatattgcagatactcgcggatatggtcagcatcgacgttagcagcgcctatagcgcgaattttcccttcagactttaactcattaagcactgcgacagtttcagcgatcggcgtaaaaaatggcggcacgctctgccagtgcgtcatgtagatatcgatgtaatcaatacccagacgttgcaagctcgctgctacctcttcgcggatagattccggggaaaggtttttatacaactgccgatcgccaactttgttgaataaacttccttttcgttcccagacaatgccgcatttggtttctactacaacctgttcacggggcagtttttttaacgcctgaccgacgataacttcactattgccaaagttatatcctggcgcagtatcaatcagattaatgccacaacgatgggcttcaagaatcgtatcaatacatatttgccgatcgagatcgccattccatgcaggaccgccgccaatggcccatgtccccaaccccattcggctaagcgtaatatccgttgtgcctaaaggtatctttttcatttgccttcattatccttcgtattcttccagcaattgttcgaccagctttctgttttttacgccggtggtggcaccgacgcttagaacgctgatagccgccgttgcattggcaaagcgtgcgcattcacgcagatttttgccttctaacagtgccgcaataaaaccactagcaaagttatcgcccgcgccaatggtgtcgatggcggttattcctgcgaccgccggcaccttcatcgtcatgtcaccacgcttgataaagcagccgtctttacccgttttaatcaccaccgtttttacgccgcacgcaagaaagcagtcagcaatttcatccagtgtctctttcccggtgagtaattttgcctcggcaaaattaggaaacagataatcgacataactcaatgcttcgcaaatatcatccagcgtttcattcaaccgcggtttgatcatatcggcacagataatcatctgccgggctttagcttgcgtaaaaatttctgttagcgctttaccatccaatagtggactgttgaaaatactggccagacttaataatttcgcctgagaaaaccgcgcaaaatcaacatcgtcaatattcaatttccacagactgccattacggtttgtgacaaacgtccgctcgccatcctccgtcaccagtccaacgttaatagaggtatctatgctgacgtcctgcttcaggctttgaatatcaatattctctttgcggcaatggtcgagaataaattgccctgcggcatctttaccaatacgactcattaatgctgtgcgatggcccagacgagaaataattgttgcttcatttattgcatcacccccggtggtcattgcgattctttcaagaggataagaatccacatcaaagatatttttactgaccggttgcaatggaatatcaacaatagcggcacctatacaaataacgtcgagattatccatatcattattccgctttgccatcagaaccgaacagtttaattttttccaatgcccgttcttttacagctttacgtacttcacgttctaaatgcaggaaaggctgatcctggttttctttcactgcaaccattgcggcctgacagagctccgtatgaatgttgattttcgcgatacccaagctaattgcagttttaatgtcggcatcactgatcccgcttgcaccgtgcaaaaccagcggaacagaaacggcatcgcgtacgcgtttgacgacctcaaagttcaattgtggctcactcgtataaaccccatgctggttgccgatggcgacagccaaactatcacagcccgtacgttcaacaaattcagccgcctggtcaggatcggtatagtgatagcccgccagcgcttcctcataaacggtttcattaccgacatgccctaattccgcctctaccggaatacccagcggatggaagaaatcgacagcctctttggttaaacgaatattttcttcgaaatcaaacgcggaagcatcacgcattaaactattcataccatgagtccaggcgttatgaataatctccatactccgaccatgatcccaatgagttattaccggcaccgttgctttttgtgccatacttaccatcatgtgagagaaatcttcaaaactggtgttaccgacaaaacctgtaccaaaagaaataataaccggggatttcgcttcttcggctgcgtcgataacgcccatcaacatttctgcattccatacgttaaaatgggcaattgcataatgtttatttgtggcatcgttttcccaatatctgatatctgcgagcatgttctgttctcccgtattaattaatcgctaattttaataacgcctttaataatgtcgcgtttgttgttaacactctcttcaaatgcctgttgtacatcccgataatcgtaaatatgcgtcaccatgcttttcacatcgaatcgcccactagaaatagcttcaatcgtgaccggataacgattggcatagcggaataccgtctggatagtgacttcgcgattgattttgaggaaattgattgcgctatcgccgggtacagtaccaacaatcataattttaccgccgcgcattaccagataaggtgcctgtttaacggtgaccgcagaacccgctgtttcgaaaacaatatctgcgcccatgtcttcggtaaattgctgacagcgtgcaatagtgtcttcttttgcgccgttaataaccactgtcgcaccaagctgttccgccattgccagacgtttttccagcacatcaacgacggcaatttccgttgctcccaggcatttgcacgcttgcaacgtcatcaaaccaatacaacctgctcccagaataattatcttcttacccggtttaacatctgccagcatcgcggcatgcatcccgactgcggcaggctccaccagcgccccttccatcgtgtccatattgtcgggcagtttgtaagtaaagctctccggatgacacagatagtgcgttaatgcgccgcggtagttgggttgtgtcgccataaaatcaacgtccgggcagatgttatatttgccttccagacagtaacgacagtgaccgcaaggaacgccaggttcgatatttacccgatcccccggtttaaatttgcgcacgcggcttcccacagccacaaccgtcccggcgcattcatgacccaggccaatttcttgatttgggtctttaggcggaataaacgggccactttcaaaaccatgtacatcactaccacaaataccgacatattctactttaatcaaaacttcatcttctttaggcactggtatttctgcactaataattttcattgtgcccggcacctgcaatattgctttactatttttcattttgaatccacccgtattatttattggctactgcatcaatacttaaactttcaacggagacacctttggtttcgattccaatggtggcgatagcaattgcgacaataatactaaccgcccccagaagaataaagactcccgtaacgccataactactgagcagcactgcaacggcataaggtgcggcaataccactgattcgccctaccgcattcgccagaccggagccacggagtttggcctctgtcggccagatttcagggacatacactgcgctggcatagcaagcgtacatatagacgaaagtaatcaggaagaaaccaatcaacgttatgagcaacatactggtttgcagactatagatatatccgagcaccgcaatcaggattaatagccccacacccattgttttacgcggaattttatccatcaccagcatggcaataaaaataccaaatggcgcgccaaacatactcatggtatttaaaacaatgctgtcttttaaattaatcccctgggtcatgaatattgttggcaaccagttaattagtgtgtactgcacaacgttcatggcaatcagcacacaagagcctaatatcacgcgtttcagtaatactcctgtcagtaaggcactatacggcaccgcttgtggcgctttaccgtcatcagcaataaccacaggcggcaaaggtttacccgtctggcgtatgacgccttcttctatactccgcatgactttctcggcttcctgataccgtccgcggctttccagccagcgcggggattcaggaaagtagcgccaggccagcgccgtagcgataaggctcaatattgcagggataagcagttgtacccgccagttccactctgcactaatcagcggcgtgagtcccatcgctatcaaactacagagcggataactccagttgccaataaaggaaacccgactactccacgttccacgatttctaccgggcatatattcggtgaaaccagcaaacagcgtaaccagtaaagctcccagcccaactcccatcacaaaacggcaggcaataaggaaatccatattcggactgaaagcaccgacaaccatgctggcaatatgaatggcctcatagaggatgaacgcatttctgcgaccggttttgtcgccaatgatgccgcccaccagcgcaccgagaaacattccggcggtcgtgattgcactgaatgtggctgtggtggaattatctgtccagcccaacgctttcagctgcgcgaggatcaagccaccaacggcattactccagcagacaagcaagccaaacgcgacgatggcaaacatactactatgccagcggcaatccggtaagcgatccagccgtgcaccacaatgcggttttgttatctgttccatgcgataacgttccttcaggagagtggttattcatcaaagtcgtaagtcatgatcactttgattgcggttttatcgaccatcgcatcaaacccttcgcgccattggctcaggccgatacgatgcgtgatcatcggtttgactttgatagcgccgctggctaatagcctgatagcgttacgccaactggtggagtcataggccatatgcccaatgatgcttttgttccaggcggtaatgtcattaatgctgaaatcaagaggtttgaagcccattccaacgcgtaccacttccccgttcgggcggagcatttcgatggcttgtttcagtgcgatattggcaccggagcattcaatcaccagtcccagattgtctttgccacaaatttgctggcagcgcgccaccacatcttcggtagaaccatttactactgccgtcgcacccagttcttttgcaaccgggaagcggaccgccacatcttcttgcagaccaacgacgacgatatttaccgcccccataattcgcgccatttgtacggagaacagcccgagtgggccagtgccgatgacgaccacatcctgaccaggaaggaatttgctttgctgcgcgatggatttgtaggcattacagatagggtcaagtacggctgcgtcctcataatcaacaccatcagggatttcccacaacgcatgacgatgaattttgagaatttcaccaggaaccagacaatatttggaaaaaccaccgccccaggtattattatccagaccaaggtttactttttctgtacaacacagaaaatcaccttgttcacaggccggacaaacaccgcaaacgtgaccgctgttatcgcttacgacgcgttgccccactttccagtctttgactttttcaccaacctgcgcaatacaacctgcgaactcatggccgcggatagagttaaactcatcagaaccgctatcgacattgtagtgcttcatgtctgcgccgcagattgccgcggctttaatttcaatcactacatcttccgggccacacatgggttgtgggacatcaatcatcttgtagccgccaaaggccttgccaaaccgagccagtgctttcattgcgtcatcctctgtgtttagttttgcttagatggccatcatacttacccacatgatttttgaggtcaacattaaatctgtaaaacacagataatgatctgcgttttacaactcagatcacaattacgcagaaaatggctgggtctgttacaggttgatggaaggcggggcgcaaaaagagcaaattcgagagggattaccggccaaataggtctgagacttaagttcaggagaagtcattcaggtgtgaacgggacggcaagagatcggactgggacttagccaggtcatggcgagataattgagatgagtcgtggggtcattgttggctatccccttcatagccgaggcaaaaaggggatgaaccacttacttaaacatggcaataggctttgcactgataccaaaatcttcttttaactgctgtttgctcttcatgaccatctgaccatttgtgtcaattgtcatatgctgtgcttcgatattatggcgggcttgccacagcatcaccagttgcaggcagttctctttttgttcctcggtcaacgcaacgccatcaggccatttccccagttcaacggcggtgctcaaacgctggtatacctcaggcatcatgctgttgataatgtcatcaagattcataatttttccgctcctgtggaataagttgctgaatcgttttttcaaccgttgatttcttcgccgttttcgccatcggtaaagcgtaaagaggcagagttaacacaataacgttcgcccgttggctgcggcccgtcggggaagacatgccccagatgggcatcacagttaccgcaacgaatttctatgcgctgcattccatgactcaagtctttgatataacgaatggattcttcacttaccggttcgtagaaactgggccagccacagccggaatcatacttggtttgggaatgaaacagcggggcatcgcagatcaaacagtgatatacgccgtcacgcttgttatgcagtaaacgacccgtaaatggcggctctgtcccatgattctgcgtcacgtaaaactgcatctcggacaaattttttttcagttcttctgcgctaggtttattagccatttgctcacatctcactttaatcgtgctcacattacgtgactgattctaacaaaacattaacaccaactggcaaaattttgtcctaaacttgatctcgacgaaatggctgcacctaaatcgtgatgaaaatcacatttttatcgtaattgccctttaaaattcggggcgccgaccccatgtggtctcaagcccaaaggaagagtgaggcgagtcagtcgcgtaatgcttaggcacaggattgatttgtcgcaatgattgacacgattccgcttgacgctgcgtaaggtttttgtaattttacaggcaaccttttattcactaacaaatagctggtggaatatatgactatcaaagtaggtatcaacggttttggccgtatcggtcgcattgttttccgtgctgctcagaaacgttctgacatcgagatcgttgcaatcaacgacctgttagacgctgattacatggcatacatgctgaaatatgactccactcacggccgtttcgacggtaccgttgaagtgaaagacggtcatctgatcgttaacggtaaaaaaatccgtgttaccgctgaacgtgatccggctaacctgaaatgggacgaagttggtgttgacgttgtcgctgaagcaactggtctgttcctgactgacgaaactgctcgtaaacacatcaccgctggtgcgaagaaagtggttatgactggtccgtctaaagacaacactccgatgttcgttaaaggcgctaacttcgacaaatatgctggccaggacatcgtttccaacgcttcctgcaccaccaactgcctggctccgctggctaaagttatcaacgataacttcggcatcatcgaaggtctgatgaccaccgttcacgctactaccgctactcagaaaaccgttgatggcccgtctcacaaagactggcgcggcggccgcggcgcttcccagaacatcatcccgtcctctaccggtgctgctaaagctgtaggtaaagtactgccagaactgaatggcaaactgactggtatggcgttccgcgttccgaccccgaacgtatctgtagttgacctgaccgttcgtctggaaaaagctgcaacttacgagcagatcaaagctgccgttaaagctgctgctgaaggcgaaatgaaaggcgttctgggctacaccgaagatgacgtagtatctaccgatttcaacggcgaagtttgcacttccgtgttcgatgctaaagctggtatcgctctgaacgacaacttcgtgaaactggtatcctggtacgacaacgaaaccggttactccaacaaagttctggacctgatcgctcacatctccaaataagttgagatgacactgtgatctaaaaagagcgacttcggtcgctcttttttttacctgataaaatgaagttaaaggactgcgtcatgattaagaaaatttttgcccttccggtcatcgaacaaatctcccctgtcctctcccgtcgtaaactggatgaactggacctcattgtggtcgatcatccccaggtaaaagcctcttttgcattacagggcgcacaccttctcagctggaaacctgcgggtgaagaagaagttctgtggttgagcaacaacacaccgttcaaaaatggcgtcgctattcgcggtggcgtaccggtttgctggccgtggtttggtccggcggcacaacaaggtctgcctgcgcacggttttgcccgcaacctgccgtggacgctgaaaagtcatcatgaagatgctgatggcgtagcgctgacttttgaattgacgcaaagcgaagagacgaaaaaattctggccgcacgactttacgctgttagcgcatttccgcgtgggtaaaacttgtgaaatcgatcttgaaagtcatggcgaatttgaaaccacctctgccctgcatacctactttaacgtgggtgatatcgctaaggtaagcgtcagtgggctgggcgatcgcttcattgataaagtgaatgacgcgaaagaaaatgtactgaccgatggtattcagaccttccctgaccgtaccgatcgcgtgtatctgaatccacaagattgcagcgtgattaatgatgaagcgctgaatcgtattatcgccgtaggccaccagcatcatctgaacgttgtcggctggaacccgggaccggcgcttagtattagcatgggcgatatgccggatgatggctacaaaacatttgtttgtgtagaaacggcttacgctagtgaaacgcaaaaagtgaccaaagagaaacctgcacatctggcgcaatccattcgcgttgcgaaacgttaatttacgttaatgttgtgtgccgggtgcaatgcatccggcacacaacatcacaccatatccagcgcagtttttccttttggtgccggatatgccttatccagcatagctaattccgcactagaaagttcgacctcaagcacagccgcattttgttggacatgggcaatcgtggccgcttttggaatcgccatcacaccctgatgactgatcacccacgccaacaatacttgtgccgcgctgatattgtgagcatgtgcaatttcgttgactaccgcgttttttaacagtccattgcgcaaccgcccggcctgggctaacggactgtaagccatcaccggcatctgctgttgctggcaccaggggagtagatcgtactcaattcctcgactaccgagatggtaaagcacctgattagtggcacactgatttccccccggcagctgccagagttcctgcatatcagcataatcaaggttagaaacgccccagcggcggatttttccctgggcgatcaatttttccatcgctgcgacagtctcttcaaaagcgaaactgccagaccagtgtaataagtaaagatcgagataatcagtattgagacggcgtaaactggcttcgcatgcatttatcgctttttgcccgccagcattccacggatagactttagagacgagaaagaccttctctcgcagaccggttaatgcttccccaaccaccttttcggcaccgccatcggcatacatttcggcggtatcaatgagggttaaaccgagttcaatgcccgcgcgtagtgcagcaacttctgttttgcgctgactggcatcttcgcccatataccatgttccctgccctacggctggcagactgacatcgccactaaattgaatcattttttgttgcattgtttcctcccaggtattgcaccaccgtaatgcaaaacagggcgtgacgccctgtttttatgcacaaaatgccctggaaagatgcattatcagaatttgtaggtgatcccggtagaaatcaggccagtccaggatttatccaccatcgggctgtcagtaacttcatcagacagacgggtgtagcgtgcggtaccgtaaacactccagtcgccgaggaagttgtagctggcgctcagctccaggtaagggctccagctgtcgttcgggttatagccacgcagaccgctgcgagcggactctttgcggcttacgccataatagtattcgttctggttttcgctgttccactgcacaccaatacccggagtcacggtcaggccaccgttggtgtaacgatacaaccaggccatatcccagacgatgccgttgctgttatccagggtatcgccagccagggtggtacgcaggtaaccgtactgggtaaagtgagcataagacagaccagccatcatggtgctcttacggtcatccaggtgacgcatttggtgatcgccactgtctttcgctttgaagtaaagcgggctccagtaagcggtaatactaagtttatccgttgcgtcattccacaggtagtaaccaccacctaagccacggaaccagaagttatcgccttcatagttgattaccggtactgggtaaacatcggtatcgtaatctttatatgggtgttcaacgacacctacgcctgcgcccagggaaaatttaccttcagcgtgcgctacgcctgcagacgttgcgataagcactccaagtgccagaagtttgagtttggtcacaattaatcattccttaaacaaatgtttagcgggcgacaaagtttacccgtcaatacatcgaaacccaacctttttacgttttcattttttaaagtaactgtttaattttcctgacgcggatgacaccgcgcttacagccaaatgaatttagcgttactggcgagcctggtctttacattaattatgcaaaatttatggatgagttgttgatatgccattgaaattaagaaagccgtgcaggcaagttttccatttgccatctacgcttaattttgaaggtgtatcaccgggcacgttgttctcatcgtcgataaaatggcatgagagttgctgtgttttagcaagagacgtcgttcagtttacctcttccgggagcctctactattcatatgaacggctcttaacctgtgctaaaaaacgaaaggacggcataccatgaatatattcgatcactatcgccagcgatatgaagctgccaaggacgaagagttcacactgcaggagtttcttaccacttgtcggcaagatcgcagtgcttatgccaacgcggctgagcggctattgatggctatcggtgagcctgtcatggtcgatacagcccaggaacccagactttctcgactcttttctaaccgggtcattgcacgttatccggcgtttgaagagttttacggcatggaagacgcgattgaacagattgtctcttatctgaaacacgcggctcaggggctggaagagaagaaacaaatcctgtatctgctggggcctgtgggtgggggtaaaagtagccttgctgagcgactgaaaagtttaatgcagctcgtaccgatttatgtattgagcgcgaacggtgagcgtagcccggtcaacgatcatccgttctgtcttttcaatccgcaggaagatgcgcagattctggaaaaagagtatggcattcctcgccgttatctcggcaccatcatgagcccgtgggcggcaaaacgcctgcatgaatttggtggcgatatcactaagttccgggtagtgaaggtctggccgagtattctgcaacaaattgctatcgccaaaacggaacccggcgatgagaacaaccaggacatctccgcgctggttgggaaagtcgatattcgtaaactcgaacactacgcgcagaatgacccggacgcctacggctattccggtgcgctgtgccgcgccaatcaggggatcatggaattcgttgagatgtttaaagcaccgattaaagtgctgcatcccttgttaaccgccactcaggaaggtaactacaacgggacggaaggtatctccgccctgccgttcaacgggattattctcgcacacagcaacgagtccgaatgggtcactttccgtaataacaaaaacaacgaagccttcctcgatcgtgtttacatcgtgaaggtgccgtattgcttgcgcatttccgaagagatcaaaatctacgagaaattgcttaatcacagtgaattgactcacgccccatgcgcccctggcacgctcgaaacactgagtcgtttttccattcttagccgcctgaaagagccagaaaactccagcatttatagtaagatgcgggtttatgatggcgaaagtctgaaagacaccgatcccaaagccaagagctatcaggaatatcgtgactacgccggtgtcgatgaagggatgaacggtctgagcacgcgttttgcgtttaagatcctctcccgcgtgttcaacttcgatcatgtagaagtggcagcaaacccggtccatctgttctacgtcctggaacagcagattgagcgcgagcagttcccacaagagcaggcagaacgctatctggagttcctgaaaggttatctgatcccgaaatatgccgagtttatcggcaaagagatccagacggcctaccttgaatcctattccgaatatgggcaaaacattttcgaccgttatgttacctacgcggatttctggattcaggatcaggagtatcgcgatccggataccgggcagctgtttgaccgcgagtctcttaacgccgagctggagaaaatcgagaaaccggcggggatcagtaatccaaaagatttccgcaacgagattgttaacttcgtactgcgcgccagagcgaataacagcggacgcaatccgaactggaccagctatgaaaaactgcgcacggtcatcgagaagaaaatgttctccaataccgaggagctgttgccggttatcagctttaacgccaaaacgagtaccgacgagcagaagaaacacgacgactttgtcgaccgtatgatggaaaaaggctacacccgtaaacaggtgcgtttactgtgcgaatggtatttgcgcgtacgtaaaagctcttaacaaccctggcccggtacacatgttaccgggcctacaacgacagcgaaccgtgggcctgagaagcggcaacacaggcgtagcatacagttggcaaatgtagtacggggggcatatgacctggtttattgaccggcgtctgaacggcaaaaacaaaagcatggtgaatcgccagcgttttttacgccgttataaagcgcaaattaaacagagcatctccgaggccattaataagcgtagcgtgactgacgtcgacagcggcgaatccgtatccattcccacggaagatattagcgaaccgatgtttcatcaggggcgtggcggtctgcgccaccgcgtgcatccgggcaatgaccatttcgtccagaacgaccgaattgaacgtccccagggtggcggcggaggttccggcagtggtcagggccaggccagccaggatggtgaaggtcaggatgaatttgtctttcagattagcaaagatgagtatcttgatctgctctttgaagatttggccttaccgaatctgaaacaaaaccaacaacgccagctgaccgaatataaaacgcatcgggcgggttataccgctaacggcgttccggccaatatcagcgttgtgcgtagtttgcagaacagtctggcgcgacgcacagccatgacggcaggcaagcggcgggaacttcatgcactggaagagaatttggccatcatcagcaacagtgaacctgcgcaactgctggaagaggaacgtctgcgcaaagaaattgcagaattacgtgccaaaattgaacgcgtcccttttattgacaccttcgatttacgttacaagaactacgagaagcggcccgatccctccagccaggcagtgatgttttgcctgatggacgtttccggtagtatggatcaatccactaaagatatggctaagcgtttttatattctgctgtatctgttcctcagcagaacgtataagaacgtggaagtcgtatacatccgccatcatacccaggcgaaagaagtcgatgaacatgagtttttctacagccaggaaacaggcggcaccattgtttccagcgccctgaaactgatggatgaggtagtgaaagagcgttataacccggcacagtggaatatttacgctgcacaagcaagcgacggcgataactgggccgatgactctccgctttgccatgaaatcctggcgaaaaaattattacctgttgttcgttattacagctatatcgaaattacccgtcgtgcacatcagacattgtggcgagaatatgagcatctgcaatctactttcgacaactttgcgatgcagcacatccgcgaccaggatgatatttatccggtgttccgtgaactgtttcataaacaaaatgcaacagctaaaggctaaaactatcagccaggtcattatcgcctggctgatttttagcttactgtaaattatctcatttattacatacattagcttacaatcgctttaaatatgacagcataacctttacataatttagttccagaaaacaatcattcggaaaaatgattcagagtacacgtatttccatggggttattctttaaatattttttaagcttaacgaaaattgatcctggtcaaaactatatatctctgccaagtataaaatccagcactcacattgctctcctttttatggtttctatgggtacacaaaaattaaaagctcaaagcttttttattttcagtttattgctgacgttaattttattttgcattactaccttatataacgaaaacacaaatgtaaaactcatcccacagatgaattacctgatggttgttgtggctttgtttttccttaacgccgtcatttttcttttcatgttaatgaaatatttcactaacaaacaaattttaccaacactcattttaagccttgcatttttaagtggccttatctatttagttgaaaccattgtaattatccataaaccaattaacggcagtacactgatccagacaaagagcaatgatgtttctattttctatattttccgccaactcagttttatttgtttaaccagcctggcgctcttttgttatggaaaagacaacatccttgacaacaataagaaaaaaacgggaatcctgttgctggcgctgatcccttttttagtttttccccttctggcacacaatctgagcagttataacgctgactattctttgtatgtcgtcgattactgtccggacaaccatactgcgacctggggaatcaactatacaaaaatattggtttgtctgtgggcatttttactgttctttattatcatgcgcacacgattagccagcgaactatggccgttaatagcattattatgtctggcaagcctatgctgcaacttacttctactgactctggatgagtataattatactatctggtatatcagtcgcgggattgaagtttccagtaaactgtttgttgtgtcttttctgatttataacattttcaggagctgcaactctccagcaaactggcagttcatgatgtgctgaccaatatttataatcggcgctactttttcaacagcgtagagagtttattgagccgacctgttgttaaggacttctgtgtcatgctggttgatattaatcagttcaaacgcatcaatgcccaatggggacatcgtgtgggtgataaagtgctggttagtattgtcgatattatccagcaaagcatccgccccgatgatattttagcgcgactggagggtgaggtgtttggcttgctatttaccgaactcaatagtgcccaggcaaaaatcattgcggaacgtatgcgtaaaaatgtcgaactcctgaccggctttagtaacagatatgatgttcctgaacaaatgaccatcagtattggcacggtttttagtacgggtgacacgcgtaatatcagccttgtcatgacggaagcagataaagccttacgcgaagcgaaaagcgaggggggcaacaaagtgattattcatcatatttaagtgcaaaaatattcagagccatgctttttgcgtggcttttgcatacaatttattactattacccctaaatttcccctccccagcggcgcagagatgagtataattagcgcccctgtgccaggccgcaatcgaactttatctggttttctcgtttcactaaccgaaggagatgcgtataaagcttccgatgagcgtttatatgtcaataagcagaacaaaaacagccgttcatgataaccttctgtggttgtttgcttgtaatctcaggagcgtgaaatgactgaaatggctaaaggaagcgtgacgcatcagcggttaatcgctttattaagtcaagaaggtgctgacttccgcgtcgttacccatgaagcggtaggtaaatgtgaagcggtgagtgaaattcgtggcaccgctctaggccagggtgctaaggcactggtatgtaaagtcaaaggcaatggcgtaaatcaacatgttctggcgatcctcgcagccgatcaacaggccgatctgagccaactcgccagccatataggcggattacgcgctagcttggccagcccggcggaagtcgatgaactcacaggctgtgtcttcggcgcgatcccccctttcagcttccatccaaaactcaaactggttgccgaccctctactcttcgaacgatttgatgaaatcgccttcaatgcaggcatgctggataaatccgttattttgaaaaccgcggattatttgcgcattgcgcaaccagaactggtcaatttccgccgcactgcgtaattagccggtccgttcgataagaagaacggacaaaaccagtacaacagcaatggcaaaaaagctactcgtgataatcagtgtctcgacaaacatttgatcgttcatagcatgcccccgggagatagctgttttcacgttattgttagcgtgcacaaatggcagtttgatgacagttcgcctgattttttatgcaaaaaacgtaaagattttctacttccttcctgcagcaagcgtaaagtaagcaggcttattattttttggcaaggaaaccacgatgtttgatgtcactttgctgatcctgctcgggttagctgcgctgggctttatcagtcataacaccactgtcgccgttagtattctggtgttaatcattgtccgcgtcacaccgttaagcaccttttttccgtggattgaaaaacaggggctaagtatcgggataatcattctgacgattggcgttatggcccccatcgccagcgggacgctaccgcccagtaccttgattcacagctttctgaactggaaaagtctggtggcgattgcagtaggcgtgattgtctcctggctgggtgggcgcggcgtgacgttaatgggcagccagccgcaactggtcgccgggctgctggtaggcactgttttaggcgtagcgctgtttcgcggcgtaccggttgggccgcttattgccgcgggtctggttagcctgattgtggggaaacagtaattattgccgcgggtctggtttcgcactttgtggggaaacagtagttaatctcgcaatatatcggcctggcgtttgccccaggcctttcttaaacatagtaataaaggccgttgtactatcataccccagcgtatgagcaactttctgtacagtatcgcctttcactaatccctgaagcgccataatcagctgtaactgctgacgccactggcgaaaactcaaccccgtctcttttactatcagtcgggcaagattgcgttcactcatcgcaaaaaagccagcccattgccccaatgccccccactcgacaggccctttcgccatcatctccaccatcgtgcggattttaggatgagaagaaacgggcaggtgcagctgttgttgtggctgctgagggagttcatcaaacaggacctgaattaatctgcgggtcattggctcagcacgctgagtcgtcgtcctgtttgccagggttaaaattaattcccggcataaggggcttattttcaatgtgcaacatgttgtcggcattgtcactgcgctgggttcgataaacagaaaacagagttcagcattagctgttacttgattgctatgttccaccccgcccggtatccaaaccgcatattgtggcggcaccatccacaaagcattttccaccgtacaggtaattgcaccatgtagcgccagtatcagctgtcctttgcggtgctgatgtacaggactggttaactcatccgttccggcgtgaatacaaaatgcgaccgcggcttcatggtgtcggtcgggttcatagccattgagattcaacctgtgcatcattttgtccgaacttagcgataatttgtcattttagcttgattcaacataacaataaaaacggtaaggtacagcctcgtttgtaacaatgagaagcatatgacctgtagtactagtttaagcggcaaaaacaggattgtccttatcgctggcattctgatgattgccacaacattacgcgtcacctttaccggcgcagcaccgttactggatacgattcgttccgcttacagcctgacgacagcgcaaaccggcttattgaccaccctgccattattggcctttgcgctaatcagtcctttggctgccccggtagcgcgacgttttggtatggaacgtagcctgtttgccgcgttacttttgatctgtgctggtatcgcaattcgctctctccctagcccttacttattatttggcggtacagcggtcattggcggtgggattgcattaggcaatgtcttactgccaggattaattaaacgcgatttccctcattccgtcgccagacttaccggcgcatattccctgacaatgggagctgcagcggcactgggaagcgctatggtcgtgccgctggctttgaacggttttggctggcaaggcgcgttgctcatgctgatgtgttttcctctgctggctctttttttatggctgccacagtggcgaagtcaacaacatgcaaatttgagtaccagccgcgccttacatactcggggtatctggcgtagtccgcttgcctggcaggtcacattgtttcttgggatcaacagtctggtctattacgtgattattggctggcttccggcgatcctcatcagtcacggctatagcgaagcacaggcgggtagtctgcatggtttgctgcaactagccacagcagcacccggtttgctgatcccacttttcttacatcatgtgaaagatcagcgtggtattgcagcgttcgttgccttgatgtgcgcagtgggcgcggttgggctctgctttatgccagcgcacgcgatcacctggactctgcttttcggttttggttccggcgcaacaatgatactggggttgacgttcattggtctgcgggctagttctgcgcatcaggcggcggcactcagcgggatggcacaatccgtcgggtatttgttggcagcctgtgggccgccgctgatgggtaaaatacacgatgctaacggtaactggtctgtaccacttatgggtgttgccatacttagtctactgatggcgattttcggactttgcgccgggagagacaaagaaattcgctaatatccggtgctatagtgacgtaacaaatcatgcgtgaaagggagaacaaacacgatgaatattcagtgcaaacgcgtttatgatccggctgaacagagcgatggttatcgcatactggtcgaccgcctctggccgcgcggtatcaaaaaaaccgatttagcccttgatgagtgggataaagaaatcacgccgagtacggaactgcgcaaagcctttcacggcgaagtcgtcgattatgcaacctttcgcgagcaatatcttgcagaactggcgcaacacgagcaagaaggaaagcggctggcggacatcgccaaaaaacagccgctgaccctgctctacagtgcaaaaaacaccacgcagaaccatgcgctggtgctggccgactggctacgtagcttgtgattttagtacagcatccggcggttatttttcaccagccggatggtcacgccgccacaatgcccattcatcaatcgtttcaccgcccggtaatttgcaattgttgctgaccccttgcgctgtctgcactggaatgagcgtcccgcccttctgctggcaatagacgctcgccggatttgccataccaatctgcggcggtttaggtgcttctggctgagaaggggtactacaaccagccaggaccagcaagcaaggcagaacaaaactgataattttcatttattgatctcacatatttatccaagattagagtatcgcggtatcgttttgttttgcagcactatttttattacattcactcaaaacatattacgtcttgtttcatctttgttgatgatgttttatcatgcctgcaaagattaaataatcagcatttacccgccgtatcctggagttgttccgtgagtgatcagattatcgcccgcgtcagccaatcccttgccaaagaacagagtctggaaagtctggtccgacagcttctggagatgctggaaatggtcactgatatggaaagtacctacctgaccaaagtggatgtcgaagcgcgcctgcagcatattatgtttgcccgtaacagccagaaaatgtacatcccggagaattttaccgtcagctgggattacagcttatgcaaacgcgccattgatgaaaactgctttttcagcgatgaagtccccgaccgttggggtgactgtattgcggcacgcaatcttggcatcaccacatttctgagcacgccaattcacttaccggatggaagtttctatggcacgctttgcgccgccagcagtgagaagcgccagtggagtgaacgcgcggaacaggttttacagttattcgccggactgattgcacaatatattcaaaaagaggcactggttgaacagctgcgcgaagccaatgctgcgctgattgcgcaaagctataccgacagcttaaccgggctaccgaatcggcgggcgatttttgaaaatctgacgacactgttttccctcgcccggcatcttaaccataagataatgatcgcgtttatcgatctggataacttcaaattaatcaatgatcgttttggtcataatagtggcgatctgtttctcattcaggttggcgagcgccttaatacgctccagcaaaatggcgaagttattggtcgtctcggcggtgatgagtttttagttgttagtctaaacaacgagaatgcggatattagcagcctgcgagaacgcattcagcagcaaatacgtggagaatatcacttaggtgatgttgatttgtattatcccggtgccagtcttggcatagtagaagtcgatcctgaaacaaccgatgcagacagtgccctgcatgctgccgatattgcgatgtatcaggagaaaaaacacaaacagaaaacaccttttgtcgcgcatccagcgctacattcctgaggcgtattcacatccttttgattggtgataacatgcgaatcggtattatttttccggttgtaatcttcattacagcggtcgtatttttagcatggttttttattggcggctatgctgccccgggagcataaagatgaaaaaaacaacgattattatgatgggtgtggcgattattgtcgtactcggcactgagctgggatggtggtaacgtcacctctaaaaaatagcaaaggctgcctgtgtgcagcctttgtgcaatttaagcgttaacttttaatcttcctgtagataaatagcacgacaatcgcaccaataacggcaaccacgaagctgccaaaattgaagccatcgactttaccaaagccaaacagcgtgctgatccatccgccgactacggcaccgactatccccagcaggatagtcataaagaatccacctccatctttacctggcatgatccacttcgccagaataccggcaataagcccaaaaataatccaactcagaatgcccattgtttcctcacttatctgttttgcattagcgggttagtcgctgataaaaagcatagcacaacatcgggagggcaagatttgtgacgagcatcacggaggttttttttgcgatggcgcagaaattgcgccatcaacgatcagtgataattaccaaccacaaacatcatgttcgttttccgtgtcataagaacgtacggtattcaccagatcttttatcacttcagccgccacttctggcaccagcaaagtcatcggcgtctctgtttcataatcgacagaaacgccattgctgttattggtgacggtcacggtatacgttgctttgcccatgattcatttcccgttatgaatgactttccgttgttgcgcaccttccatcaggacttcaggagccacgaagaagtcaatgttgaaataagtatcgtcagtcatggcttcaatgttgtgccacttttctggagggaacaccgcaaactgccccgcttcgataaggatcacctgatcaggctctgcactgtgttcatcagcgtagccgagatatttgaccgccccatgcataacggaaaggcgtgggtaaacccccgggcgcgttcctttatcaagatgacgttcgaatattccggcaggtgcagtttgtttattccagaaaggcgtactgcgcgtatgaatataattctgtgggatttgaagcatccttttccctccttcggtgaatgcgctgaaaacggtttattccagccgtttcagggtacgcctgataatttgcattttaaataccatttattggttactttttagcaccatatcagcgaagaatcagggaggattatagatgggaagcccgcgacaacgcgggctgaaagcatcaggattgcagcgtcgccagtcgggcagcgaaacccacgaacatcaaaccaatcagactgttgccaactttagccagtttctttttggtacgtatgtactgcgtgacaaaagcaccagatataatcaggaagctcaaatagcagaaactcaccagttccagcgtcgccgccagaataaagaaactaattcccgtatgtggggcattaacatcgataaactgtacgaaaaagctcacatagaacaaaatggctttcggattagtcaggctcaaaattaacgcgcgtttaaaaatagcaccgtattggggctcatcggatttggcctcgctatttttacccttcagggtcgcgtaaagaattttactccccagatagagcaaataaaacgcaccaagataacgtacaatgttgaataatatcggggtggtcttaattaatgtcgccactccagcccatgccagaaacatcaataccgcatcgccaataaatacaccgcaggccgcaagataaccgcctttcataccgctactgacgctatttttgagtacaaacagggtatttggccctggcaccaacacaataaaaatggccccaaccagataggtccagtaattcagaaccccgtattcagcgaacacattaacctctttaattatctttcgatcatgcgcgattaaaggtgaatatgctaaccaatctgtagcggcttagaaaggagaaaatcaggttttaacctgatatcaacccgataattgaatcattaatcaggcatgctccagactaaaattcgggtagtgctcggcaaaatactggcgtaaaaattctaccgttatccgcactttcgcactcgtcgccagcctactaacataaacggcccagacgttcgctggctggtaatattccggtagcacttgcactaaatgaccactggcaatgttttcgctaacatcccaccaggaacgcagagcaatcccctgcccatcgagacaccactgatggacaatttctccatgattagagctcagtgggccggtgactttaatcgcatgggggccttctttattgcgtaattgccagacaccaaaaggatgatcgcgctctttaatgaccaggcacggcaatgcagaaagatcggttaaatgtttcggcgcgccatgttgcgcaataaattccgggctcgcgcagagaatacggtaattggtcgccagtttgcgggcgattaaattaggggcgatgtcatcgccaatgcgaatatcgagatcgacaccttcattgaccaaatcgaccagtcggtcttccacatcaaaacgtaattccagttgcggatacgccttcgccagcgctaataacgccggagccaccacctgtcgtccaaaaccaaagctgctgataatacgcagcatcccctgcggcacctgacgcacgtcagaaagttcgtccatcatctgaccgacatcctgcaaaatccgctgcgcccattcataaatccgctctccttcttcggtaatggtgacgcggcgggtggtgcggtgtaacaacaccacgtttagcgtttgctccagcaaggcgatgcgcttgctgacgaacgccggactaacgcccagttcttccgccacggcggcaaaaccagcccggcgagccaccagcataaagacgcgcaaatcattcagcagcggtaaattattcatgattcgtgttttatgtttcaccagttacggggattaattccttttcagtcaattataggatggtgatgttgtcaattttgatggtcaggaagtgagaacccaatgatgaaaacgatgcgtattgctgcgatcccgggagacgggattggcaaagaagtccttcctgaagggattcgcgtgttacaggctgccgctgagcgctggggcttcgccttgagttttgagcaaatggagtgggcgagctgcgagtattacagccatcacggtaaaatgatgccggacgactggcatgagcaacttagccgtttcgacgccatctattttggtgccgtcggctggccggataccgttccggaccatattagcttgtggggtagcctgctgaaatttcgtcgtgaattcgaccagtacgtcaacctgcgcccggttcgtctctttcctggcgttccctgcccgctggcgggaaaacagcctggcgacatcgatttttacgtggtcagggaaaacaccgaaggcgaatattccagcctcggcggtagagtgaatgaaggtacagagcatgaagtcgtcattcaggaaagcgtatttacccgccgtggtgtcgatcgcattttgcgttatgccttcgaacttgcgcaaagccgtccacgtaagacactaacttctgccactaaaagcaacggtttagccatcagcatgccgtactgggatgagcgagtggaagcaatggccgagaattacccggagatccgctgggacaagcagcatattgatattctctgcgcgcgttttgtgatgcagccggaacgattcgatgtggtggtggcgtccaatttgtttggcgatatcctttccgatcttggcccggcctgcaccggcaccattggcattgccccatccgccaacctgaatccggaacgcactttcccgagcctcttcgagcctgtccacggttccgcgccggatatctacgggaaaaatattgctaaccctatcgccacgatttgggccggggcaatgatgctcgattttctcggcaatggcgatgagcgtttccagcaagcgcataacggtattctggcagcaattgaagaagtgattgctcacgggccgaaaacacctgatatgaaaggcaatgccaccacgccacaggttgccgacgcgatttgcaaaattattttgcgttaaggtcaaaccagtttatttgaaccgcgtcactgacgcggtttttttattcgttctttgcagtaaataacctgcgtcatttcaccttttattgtttccgtttcgtgttttatggctttccgtattcttaattgtttaatttatgtaacatgcaaattttgttacgcgtacgttaggttccgccgtacaggtattggttttgctggcaatgggactggtgatttatttagccaccagtaaatacggcaatattcgtcttggcgaaggaaaaccggaatacagcacgctctcctggctgtttatgtttatttgtgccggtttaggttcttctacgctttattggggggttgctgaatgggcctattattatcaaacacctggattaaatatcgcaccgcgtagtcaacaggcactcgaatttagcgttccctactctttcttccactggggcatcagcgcctgggcaacttatacgctggccagtttaatcatggcttatcactttcatgtgcggaaaaacaaaggtctgagcctttccggcattattgctgctattaccggcgttcgcccgcaaggcccatggggaaaactggtcgatttgatgttcctgatcgccactgtcggcgcactgaccatttcccttgttgttaccgcagcaacctttacccgtgggctttccgcgctgaccggtttacccgataacttcaccgtgcaggcatttgtgatcctgctttccggcggcattttttgcctaagcagctggattggtatcaacaacggtttgcaacgtctgagcaaaatggttggctggggcgcgttcctgctgccattactggtgctgattgtcggcccaaccgaatttattaccaacagcatcatcaatgccatcggcctgaccacgcaaaacttcctgcaaatgagcttattcaccgatccgcttggcgatggtagttttacccgcaactggaccgttttctactggctgtggtggatcagttacacccctggcgtagcaatgtttgtcacccgcgtttcccgcggtcgtaagattaaagaagttatctggggactgatcctcggcagcaccgtcggttgctggttcttctttggcgtaatggaaagctatgccattcatcagtttatcaatggcgtaatcaacgtcccacaggtgctggaaacactgggcggcgaaacagctgtacagcaagttctgatgagcttgccagccggtaaattgttcctcgccgcatacctgggcgtgatgattattttccttgccagccatatggatgcagtggcctacaccatggcggcgaccagtacgcgtaatctccaggaaggtgacgatcctgaccgtgggctgcgtcttttctggtgcgtggtgatcactctgatcccgctttccatcttgtttaccggtgctagcctggaaacgatgaaaaccaccgtcgtgctcacagcccttcccttcctcgtcattttactggtgaaagtcggcgggtttattcgctggctgaaacaggattacgccgacattccggctcatcaagttgaacattatctcccgcagacaccggttgaagccctggaaaaaacgccagtgctccctgcgggaaccgtattcaaaggcgacaactgagcgccatcatcctaacgataaaggtatccctatgagcaatctgagccctgactttgtactacccgaaaatttttgcgctaacccgcaagaggcgtggaccattcctgcccgtttttataccgatcagaacgcgtttgaacacgaaaaagagaacgtcttcgccaaaagctggatttgcgtcgctcacagcagcgaactggcgaatgccaatgattatgtgacgcgtgagatcattggcgaaagcatcgtgctggtacgcggtcgtgataaggttttgcgcgcgttctataacgtgtgtccgcaccgtggtcatcagttgttgagcggtgaaggaaaagcaaaaaatgtgattacctgcccgtatcacgcatgggcattcaaactcgatggcaacctggcccatgcacgtaactgcgaaaacgtcgccaatttcgatagcgacaaagcgcaactggttccggtgcgtctggaagaatatgccggattcgtcttcatcaacatggaccccaacgccaccagcgtagaagatcaattacccggcctgggcgcgaaagtgctggaagcctgcccggaagtccacgatctgaaactggcggcccgctttaccacccgcacgcctgccaactggaagaacattgtcgataactatctcgagtgctatcactgtggtccggcgcatccaggtttctccgactccgtacaggttgatcgttactggcacaccatgcacggtaactggacgctgcaatacggtttcgccaaaccgtccgaacagagctttaaatttgaagagggtacggatgcggcattccacggtttctggctgtggccgtgcacgatgctgaacgtcaccccgatcaaagggatgatgacggtcatttatgaattcccggtggattctgaaactaccctgcaaaactacgatatttacttcaccaatgaagagttaaccgacgagcaaaaaagcctgattgagtggtatcgcgatgtgttccgtccggaagatttacgtctggttgaaagcgtacagaaagggctgaaaagccgtggctatcgtggtcaggggcgcatcatggccgacagtagcggtagtggcatttccgaacatggtatcgcccatttccataatctgctggcgcaggtgtttaaggactaatgacatcggcggcggtattttccgccgctgggctgatttttgatggagtacagcaatgagtgactatcaaatgtttgaagtacaggtgagccaggttgaaccccttaccgaacaggtgaaacgcttcacgctggtggcaaccgatggcaaaccattacctgcgtttaccggaggaagtcacgtcattgtgcagatgagcgatggtgataaccagtacagcaatgcgtatagtctactgagtagcccgcatgacacctcttgttatcagattgccgttcggctggaggaaaacagccgcggcggttcccgctttttgcatcagcaggtaaaagtgggcgatcggttaacgattagtacgcctaataacctgtttgcgctaattcccagtgccagaaagcatctgtttatcgcgggcggtattggtatcacccctttcctgagccacatggcagagctgcaacacagcgacgtcgactggcagctacattactgcagccgaaatccagaaagttgcgcatttcgtgatgagctagtccagcatccgcaggctgagaaagtccatttgcatcatagtagtaccggaacacgactggaattagcgcgattattggcggatatcgaacctggcacacacgtttatacctgtggccccgaggcgctaattgaagcggtaagaagtgaagctgcgcgtctggacatcgccgccgatacgctgcactttgagcaatttgctatcgaagacaaaaccggcgatgcatttaccctggtgcttgcccgttccggaaaagagtttgtggtgccggaagagatgactattttgcaggttattgaaaataataaagccgcgaaagtggaatgtttatgtcgtgaaggggtatgcggaacctgcgaaacagcaatactggaaggtgaagctgaccatcgggatcaatattttagcgatgaagagcgtgccagccagcaaagtatgttgatctgttgtagccgtgcgaagggtaaacgcctggtgttggatttgtaatttgccgaagccggatgtggcgctgagcgcgcccagtccggcttcggaagattttactgcggatattcctgcaataaattgtgtaatgcttccgccatcagctcaccacgccagccggaaatcagctccggcaaattgttctgcggtttcagtttccagtgccagttcagcagttggttgatttgccgacggcttgccagcaattcggcgctgatcttatgcgtttcgctcacgtcagtaatcaggctcttaatcgctttaaacgctttacgataacccggcatgtccatcaggttaagcatcggctgcggtaaggcatcttccggcaatgtctgcgctttttccaccagcgctagcagcgttttaccgtgaaagcggatttcgctaccggataaacccaggctgtccagttcgcctaaacttcccggcatataacgcgctacgctccacaaatgctcttcacgcacgacaaagttcaccgccagatcgcgctctcgcgccttgcgcagtcgccagtcggctaacagttgcagacaggccagttggcgtgtgcgtaattgccaggcattggtgatatcacgccaggcatcttccggcgcaacgacttcctgacgacgcatttgcatcaggcggcattcatccagcgccgcaggtagccagccggaggcctccgtttctaccataagcttggcggtgatcggtaacagataccagacatccgccgctgcgtattcacactgacgttcggtcagcggtctggccagccagtcggtgcggctttcactcttgtccagcgtaacgccggaatactcttccaccatggaagcgaaaccccaactcatcgggcgtccgcagaaggcagcaaggatttgcgtgtcaatcaagggttgtggtaattcgccaaagacattgaggaacacttccagatcttcactgcctgcatggagaaattttgtgatggacggatcgcgcaggatcgctttcagcggactccagtcggtgatcccgagtggatcgattagcgccagatgctcgccatcgaaaagttgaatcaaccccagctgcgggtaataagtgcgcgtacgaacaaattcagtatccagggctatcgccggaaaggcacggacggcttcacacaaagaagccagcgcatcgtccgtggtaatcatttggtaattcaaattgttttctctttagtgggcgtcaaaaaaaacgccggattaaccggcgtctgacgactgacttaacgctcaggctttattgtccactttgccgcgcgcttcgtcacgtaattctcgtcgcaaaatttttccgacgttagatttcggtaactcatcacgaaactccaccagcttcggtactttgtatcccgtgagctgacggcggcaaaaagtcaccagactctcttcggtaaggcttggatcttttttcactacgaagattttcaccgcttcaccactggagccggaaggtacgccaacagccgcgacttcctgtacgccaggatgctgcatgacgacatcttcaatctcgttgggatagacgttaaaaccggaaaccagaatcatgtcttttttacgatcgacaatgcgcaggaatccttcttcatccattaccgcgatgtcgccggtgtgtaaccagccatttttgatgatttcatcggtagcatcgggacgctgccagtaacccagcatcacctgcggtcctttgacacaaagctcacccggttgacctggtggtacttcattatcatcatcatccaccagtttggcttccgtgctcggcaccggcaaaccgatgctaccactatgataatcaatatcatatgggttaacgctgaccagcggcgcacactcggtaaggccatagccttccagcagatactgtccggtcagtttcacccaacgctctgccaccacttgctgcactggcatcccaccgcctgcggaaagatgcagactggagaaatccagctgctggaactctttattgttcagcaacgcattgaacaaggtgttaacgcccgtgatagcggtaaacggatatttcgctaactcttttaccaaccctggaatatcgcgcgggttagtgataagcaggttctgcccacccagttcgataaacagcaggcagttaatggtcagggcaaaaatgtgatacagcggcagcgccgtcaccaccagctctttgcccggatgcaacagcggaccataggtcgcgttaacctgttccaggttcgccagcatattgcggtgagtcagcatcgcgcctttcgccacaccagtggtgccgccggtgtattgcagaaaagctaaatcttccggcaccagttcgggtttgacgtactgcatccggtagccgttatgcagtgcgctacgaaaactaatggcatctggcagatggtatttcggcaccaaacgcttgatgtatttaacaacgaaattgactaccgtgccttttgccgtagatagctgatcgcccatacgggtcagaattacgtgctgaacggcggttttatcaaccactttttccagtgtgtgagcaaagttagacacgataacaatcgcgcttgcgccgctatcgttaagctgatgctcaagctcacgcggggtatacaacgggttaacgtttacgacgatcatcccggcacgcaaaatgccaaacagcgccaccggatattgcaataaattaggcatcatcaacgcaacgcgatcgcctttcttcagccccaacccttgttgcaaataagcggcaaacgcgcgactgcgttcttccagcttgcggaaggtcattacctcccccatattcacaaacgcaggttgatcggcgtagcgcgcgacgctctgctcaaacatatctaccagagattgataacggtcagggttgatctccgtcggaacgtccgcgggataacggttaagccaaaccttcttcaattcttcacctctaaaatgcgtgttcgtcgtcatcgcaaccccaaatgatatacatgccgttaacataatattaactcatcataccagcttgataattacccaacgaaaaggttgcgaagcgcgtcactatttatttttatctttaccgtaagaatgcagaaacagcggaccagccgctgtttctttttctttaaaaacaagcaattattcagttacaactgtttgtactctcgcggggccgggattataccagccccatccgccgtagccatagggccagccacgaccgccataaaaccatggatcaatcggctgaggcggcataatcacctgctgggttaaatgccaacgtttgtaacccgttacttgcatcaccataaatttatagggcgtattgccgattttgccgtcaaccgcaccagtgattggcccgactaccgtaaccagttgtccacggaaatccaccgggtccagaaaaccgttcacatcggcataaatgcgaccgcgagaaggttctcccagcgtcggtctggctccgctgtccagcggtacggtagcaatttccaggcgagttttcccttgctggttttgtaccgcaaccactttgccaccaaagcgtgcctcctgaccaacgtacagctgcggcgcactcatcacccgaactaaatcttgttgcggcgtgggactgctgcctttaatggcgtccggcacagtgacacaaccgctcagcattagcgcaaacgtacctgccagtatgcctttgataacattcttttgaaccgccatggtgcgactcctttttttctcagggcatactcttaagattcattctttgcccggaagtttcttccatgcgacgttgttacgtaaataaaccggttcggcatgttccaccgccaccgttttaccctcagcaaacatctgacacgcaatcggcagcatatcttcagcagcaggcagtaacacttcgccatcgcgcaaaaccagcccgctctctttaccgagatccggccaagcttgccagcccgtccctaccgtcacccattcgccggaaagctgttgcattcgttcatggacgatttcgggtttgagtacggcttcggtttcttcaccgtgccagataccgttttcatcacgctgatattcggcccagtaaacttcgcccattcgcgcgtcaatggctgccagcacgcgggttgcgccgtttttgcgccacgccccttgcgccatcgtcattagcgtggagacgccaatcatcggtaattccgcgccaagcgccagcccttgcgcgatgccaataccaatgcgcacgccagtaaagctaccggggccgcgcccgtaagccagagcgttaatatcagtcagggaagttccgctggtggtcaggatatcctgcaccatcggtaagattcgttgagtatgttcacgagggcaaagctcaaaatgagcgttgacagtaccgtcgttccacagggcgacagagcaggcctctgtcgcggtatcgatagccagaattcgcatgggtcttcgtgcttagatcaataaaaaggcgcgcatcataccatactccgtaacaaattacctggaggatggtatcgcaaggaaacgaaccgcacgggcaatgtcacgggtgcgtggcgcgggcggcagactggcgagaaacgtcgcgccgtaaggacgcatcaccagccgattgtcacaaatcaccagcacgccacgatcgtcggcgtcgcgaatcagtcgccctaccccctgtttgagagtaatgacggcatctggtagttgcacttcatcgaacgggtcgccaccgcgcaaacgacaatcttccatgcgcgcttttaacagtggatcatccgggctggtaaacggcaatttgtcgataattaccaaactcaatgtatcgccacgcacgtccaccccttcccagaaactgctggttgccacaagaagcgcattaccggcgctgacaaattgctgcaacagttgccctttgctggtttccccctgcaacaatacaggaagcgtcatggtagcgcggaactgctcggccagatcgcgcatcatggcgtggctggtacaaagcataaaacaacgaccgttgttagcttcgatgatcggtcgcagcattgccgctaactggcgagcagaacctggctggttggtttgcggcagattgcgcagcacacagagtaacgcctggcggctgtaatcaaatgggctgggcaacagcaagctctcggcctgttcgatgccaagccggctggtgaaatgatgcagatcgtcgttcacgctcagcgttgcactggtgaagatccagctaccgggtttttgcgccattaactctttgaatttatccgccacgctgagcggcgtgagagccagagtaaaatggcggctagtgcattcgtaccagtagctgtagcccggctgattgatctcttttagccgcttcagccgtgtgcgatacaacgtggcgcgctcaaatgccgcatccagcaaggcggaacgccccagactcagtttcgccacgtcataacaaagttccagggtgtcatcgagcagtaaaaatgcccgctgaatttgcggattagctaacagctcacgcaggttaccgcgataacctggctcaccgagttgcagacgaaaatcctgcgcactctgggcaagacgatcagcgcacttttgtaactgctgggtgtcttttaattcggtgcggtaggcgatggtgatgtcttttgccaggtcgagcagttgtcgactggagagactctgaccaaaatactggctggcaatgtccggtagctggtgggcttcgtcgaagatcatgacgtccgcttccgggatcagttcgccaaatccactctctttaaccaccatatccgccagaaagagatgatggtttaccaccaccacatcggcgtccatcgcttttttacgtgctttgaccacaaagcaatctttatacatcgggcagtcgctgccaagacagttgtcgttggtgctggtgaccagcggccacgcctgactatcttccgccacgctgacgcaggtgctgatatcaccatcgactgtttgattagaccaggagcgcagcaggatcacatcgcttaagatttgtaccggcagatcgccccccgccagcgcctgctgttcgagacgttcgaggcagaggtagttactgcgccctttcagcagcgccacgttgcccgtatatttcaatgccttactgactgttggcaaatcgcggctgtagagctgatcctgcaacgctttactgccggtgctgataatgactttctttttcgcccgcagcgcaggagccaggtaagcgtaggttttgcccgtaccggttcctgcttccaccaccagcggctggcctttttctatcgcctgggtgacggctaccgccatctgtcgctgtggttctcgcggcttaaagcctggtatcgctttcgccagctgaccgtctggtgcaaaatcgtccgtcacactaccccctgttgatttgaacagggattatgtcaggatgagggcgctttcgccagttgaagtggtgacggcgacctcacattgtggcagtctttgcagcacgaaaatggaagtataatgaggacaaaatgatgactatcgttcgtatcgatgctgaagcccgctggtctgatgtagtaatccacaacaacacgctctactacactggtgtaccggaaaacctcgacgccgatgcctttgagcaaaccgccaacacgctggcacagattgacgccgtgctggaaaaacagggcagcaataaaagcagcattctggatgccaccattttcctggccgataaaaacgacttcgcggcgatgaataaagcgtgggatgcttgggttgtcgcgggtcatgcgccggtgcgctgcacggtacaagcgggtttgatgaacccgaagtataaagttgaaattaagattgtggctgcggtgtaagctttatcgaagcaaaataagtcagacgataatttatcgataatactggtcggttttacataaatcgaccagagaataagatattactgttgatgcttctgctaattcattatttatatttataatttcaattttatctataaaactaactatataaataaacataaacatgccgttgtgttcgccctttgattagcaactctggttttctttcttagctgaacaatctggttatagcgtgcggactgaccgttaaatttctccatcttactggataacacaccatgagctgctacctttaaaacacctgaatgtcaacaggttaactcgtgccatatcgttataatccctttgatattagatgcaaattaaggtcatatatagccttatcgataacatggttaattttaaggataagaatatgcctgctgtaatagataaagccctggatttcattggtgccatggatgtaagtgcgccaacaccaagtagcatgaatgaaagcacggcgaagggaatctttaaatatttaaaagaactgggagtacccgcgagtgccgctgatattacggcgcgagctgaccaggaaggctggaaccctgggttcacggaaaaaatggttggatgggcaaaaaaaatggagacaggtgaacgttctgtgattaaaaatcctgaatactttagtacatatatgcaggaagaactaaaagcactggtctgagttaaatttatatcagcataaatgggtcaggacgcttttaatcacatataaaaagcgtcctttttctcacaatcaaatgatcatcggcttctataacgaaatcgatacggattagtgtgttactcgtcttcatcctcaaaacgcgccacgattcgctcgccggagtggttggcacgcagctcttctgccaccagcgcgattgcctggccgctgctcatcccttgtgccatcagttcctggatccgctcgacagctttttgctgctgttcatgggtgagactaggtaaacctgcaaacattgttaactcctgctaaattgttggcgctaattatttcatgctacccggcacatagccagtagagtcaggactgatgaagacgttatctcccgctgtgattactttactctggcgtcaggacgccgctgaattttatttctcccgcttaagccacctgccgtgggcgatgcttttacactccggctatgccgatcatccgtatagccgctttgatattgtggtcgccgagccgatttgcactttaaccactttcggtaaagaaaccgttgttagtgaaagcgaaaaacgcacaacgaccactgatgacccgctacaggtgctccagcaggtgctggatcgcgcagacattcgcccaacgcataacgaagatttgccatttcagggcggcgcactggggttgtttggctacgatctgggccgccgttttgagagtctgccagaaattgcggaacaagatatcgttctgccggatatggcagtgggtatctacgattgggcgctcattgtcgaccaccagcgtcatacagtttctttgctgagtcataatgatgtcaatgcccgtcgggcctggctggaaagccagcaattcagcccgcaggaagatttcacgctcacttccgactggcaatccaatatgacccgcgagcagtacggcgaaaaatttcgccaggtacaggaatatctgcacagcggtgattgctatcaggtgaatctcgcccaacgttttcatgcgacctattctggcgatgaatggcaggcattccttcagcttaatcaggccaaccgcgcgccatttagcgcttttttacgtcttgaacagggtgcaattttaagccttagcccagagcggtttattctttgtgataatagtgaaatccagacccgcccgattaaaggcacgctaccacgcctgcccgatcctcaggaagatagcaaacaagcagtaaaactggcgaacagtgcgaaagatcgtgccgaaaatctgatgattgtcgatttaatgcgtaatgatatcggtcgtgttgccgtagcaggtagcgtaaaagtaccagagctgttcgtggtggaacccttccctgccgtgcatcatctggtcagcaccataacggcgcaactaccagaacagttacacgccagcgatctgctgcgcgcagcttttcctggtggcagtataaccggggctccgaaagtacgggctatggaaattatcgacgaactggaaccgcagcgacgcaatgcctggtgcggcagcattggctatttgagcttttgcggcaacatggataccagtattactatccgcacgctgactgccattaacggacaaattttctgctctgcgggcggtggaattgtcgccgatagccaggaagaagcggaatatcaggaaacttttgataaagttaatcgtatcctgaagcaactggagaagtaagacgtggaataccgtagcctgacgcttgatgattttttaagccgctttcaacttttgcgcccgcaaattaaccgggaaaccctaaatcatcgtcaggctgctgtgttaatccccatcgtccgtcgaccgcaaccggggttgttgctgactcagcgtagcattcatctgcgtaaacacgctggacaagtggcattccctggaggtgcagtcgatgacacggacgcaagtgctatcgccgccgcgctgcgcgaagctgaagaagaggtcgctataccgccttccgccgttgaagttatcggcgtgctgccgcccgtcgatagcgtcactggctaccaggtaaccccagtggtcggcattatcccgcccgatctgccgtatcgcgccagtgaagatgaagtcagcgcggtgtttgaaatgccgctcgcccaggcattacatctgggtcgttatcaccctttagatatctaccgccgtggtgatagtcatcgggtatggctgtcctggtacgaacagtattttgtatggggaatgaccgcaggcataattcgtgagctggcgctgcaaattggtgtgaaaccctgactatacttatctttacatctacaaaacactacttgagacaatcatcgcaatattagttaaatcgcggtttttgattagtttaattcatgtgaatagttaagccagtcgccgcgttccctcttacactatgcgctgttattagttcgttactggaagtccagtcaccttgtcaggagtattatcgtgattagtctattcgacatgtttaaggtggggattggtcccagttcttcccataccgtagggcctatgaaggcaggtaaacagttcgtcgatgatctggtcgaaaaaggcttactggatagcgttactcgcgttgccgtggacgtttatggtagtctgagcctgacgggtaaaggccaccacaccgatatcgccattattatgggtcttgcaggtaacgaacctgccaccgtggatatcgacagtattcccggttttattcgcgacgtagaagagcgcgaacgtctgctgctggcacagggacggcatgaagtggatttcccgcgcgacaacgggatgcgttttcataacggcaacctgccgctgcatgaaaacggtatgcaaatccacgcctataacggcgatgaagtcgtctacagcaaaacttattattccatcggcggcggttttatcgtcgatgaagaacactttggtcaggatgctgccaacgaagtaagcgtgccgtatccgttcaaatctgccaccgaactgctcgcgtactgtaatgaaaccggctatagcctgtctggtctcgctatgcagaacgaactggcgctgcacagcaagaaagagatcgacgagtatttcgcgcatgtctggcaaaccatgcaggcatgtatcgatcgcgggatgaacaccgaaggtgtactgccaggcccgctgcgcgtgccacgtcgtgcgtctgccctgcgccggatgctggtttccagcgataaactgtctaacgatccgatgaatgtcattgactgggtaaacatgtttgcgctggcagttaacgaagaaaacgccgccggtggtcgtgtggtaactgcgccaaccaacggtgcctgcggtatcgttccggcagtgctggcttactatgaccactttattgaaagcgtcagcccggacatctatacccgttactttatggcagcgggcgcgattggtgcattgtataaaatgaacgcctctatttccggtgcggaagttggttgccagggcgaagtgggtgttgcctgtagtatggctgctgcgggtcttgcagaactgctgggcggtagcccggaacaggtttgcgtggcggcggaaattggcatggaacacaaccttggtttaacctgcgacccggttgcagggcaggttcaggtgccgtgcattgagcgtaatgccattgcctctgtgaaggcgattaacgccgcgcggatggctctgcgccgcaccagtgcaccgcgcgtcagcctggataaggtcatcgaaacgatgtacgaaaccggtaaggatatgaacgccaaataccgcgaaaccagtcgcggtggtctggcaatcaaagtccagtgtgactaatacttcttactcgcccatctgcaacggatgggcgaatttatacccgctttctcgtctgctgtaatattccccactacacttccactgttgcgtcaggcgtttgtcgccatacgcttacagggtggcccgcatgcaaaaagcacaacggatcattaaaacctatcgtcgtaatcgaatgattgtttgtacgatttgcgcactcgttacgctcgctagcaccctgagcgtgcgatttattagtcagcgtaacttaaatcaacaacgggtagtacaattcgccaatcacgctgtagaggaattagataaagtactgcttcccctacaggcaggtagcgaagtcttgcttccgctgattggtctgccctgctctgtcgcccatttgccattacgtaaacaggcggcaaaactccaaactgtgcgatccattggcctggtgcaagacggcacactttattgctccagcatttttggttatcgcaatgtgcccgtcgtggacattctggctgaacttcctgcaccgcaaccacttttacgcctgacgatcgaccgtgccctgattaaaggcagtccggttttgattcaatggacgcctgcagcgggcagtagcaatgctggggtcatggagatgattaacatcgacttactgacggcaatgctgcttgagccacaactgccgcaaatcagtagcgccagcctgacggtggacaaacggcatttgctctatggtaatgggctggtagattcccttccgcaacctgaagacaatgaaaactatcaggtttctagccaacgctttccttttaccattaacgttaatggtccgggggctacggcgctggcatggcactatcttccaacacaattaccgctggcggtgctgctaagtttactggtgggctacatcgcctggctggcgaccgcttaccgaatgagcttttcccgcgaaatcaatctgggcctggcgcaacatgagttcgaattgttctgtcagcctttgcttaatgcgcgcagccagcaatgtattggtgtagagattttgctgcgctggaacaatccgcgtcagggctggattagtccggatgtgtttattcctatcgcggaagaacatcatttaattgtgccactgacccgctatgtgatggcagaaaccattcgtcagcgccatgttttcccgatgagtagtcagtttcatgttggcattaacgtcgcacccagccattttcgccgtggtgtgctgataaaagatctcaatcagtactggtttagcgctcacccgattcagcaactgatcctcgaaatcaccgaacgcgatgccttactggatgttgattatcggattgcccgcgagctgcatcgtaaaaacgtcaaactggcgattgatgacttcggcaccggcaacagcagcttttcctggcttgaaacattacgtcctgacgtgctgaaaattgataagagttttaccgcagctataggttctgacgcggttaacagcacggtgaccgatatcatcatcgcgctggggcaaagactgaatattgaactggtggcggagggcgtggaaacgcaagaacaggcgaagtatttgcgccgtcatggcgtgcatattttgcaagggtatttgtacgcacagccgatgccgctacgtgattttcccaaatggctggcgggcagccaaccgccgcccgcccggcataatggacatatcacgcccattatgccgttacgttaacgcttactcatcttcatcgtgcgccggttgctctttaacaatgcgaaccagatcaacacgataatcattggcttcaatgatggtgatatgcagtggccctacatcaatcacatcgcccacacggggaatgtgaccatttgcgctgatcacgaggcccgcgaccgtcgcgatatcatcgtcatcggcaaggtgctcaacatcaagcgcctgctgcaaggcatgcaaatctgtaccgccttttaccagccagccgtcaccatcagtaatgatttccggcgtttcgtcagcgtccgggaattcacccgcaatggcttccagcacatccagcggcgtgaccagaccttgtaccacaccaaactcgttggtcacgataacaaagctcccgcgagcacgacgcagcacgcccaacaggttgatcggatcgagggtttccgggacgataatcgccggagacgcgctagcaatcgccgccacatcaacgccctcttccagcgccaccagcagttctttagcacgtacaataccgatgatttcatccagttcaccgcgacataccgggaacagactgtgcggactagagagcagttgctcgcggatttcatcgaccccgagattagcgtcaacccagcttatttcaccgcgcggcgtcatgatcccgcgcagagaacggctcgccagcgtcagtacgccgttaatcatgtaacgttcttcttcggcaaatgcaccttccgggatcggcatcggcatcgggttatcggcatcgtgctgaacattggcctgacgtttcccgcccatcaaacgcaggatggcatcggcagtacgcgctcgcagcggcaaagtgctctggtggcgaataaagttgcgacgcgcaatctggttaaacacttcgatgatgatgctgaagccaatcgcggcatacaggtaacctttcggaatgtggaaaccgaaaccttctgccaccagactcagaccaatcattaacaggaagctcagacagagcaccaccaccgtggggtgctggttaacgaatcgcgtcagcggtttggatgccagcaacataaccgccatcgcaatcactaccgccgccatcatcaccggcagatggttaaccatccctactgcagtaattaccgcatccaagctgaagacggcgtcaaggatgacaatctgtgtgacgaccacccagaaactggcgtagcctttaccgtggccggaatcatgatcgcggttttccagccgttcatgcagttcggttgttgctttgaacagcaagaatatccccccgaacaacataatcaggtcgcgtccggagaaggagaaatccatgacggtaaatagcggtttggtcagcgtgaccatccaactaatcaggctcagcagccccagacgcataatcagcgccagacttaaccccagcaaacgcgctttatcgcgttgttttggcggcagtttgtcagcaagaatggcgatgaagaccaggttatcgatacccagcacaatttcgagaacaacaagcgtgagtagccccgcccaaatactggggtccattaagaattccatgacaagctcctgcttaaggaatagctattcgacgccagaaataatgcaggcgtaacgacaaaatgcaaacgaaaggtgcggcatagagtgccagaaaggcaggcgttaaaaggcctgatgctgaaatgacgtcggtgacgatccatactgcgggctactgccctatactccatggttgttaaacgggagttaaacatatcagagacgcctctgatttggcaaagatttaccttcctttgcaaacgaatgtgacaaggatattttacctttcgaaatttctgctaatcgaaagttaaattacggatcttcatcacataaaataattttttcgatatctaaaataaatcgcgaaacgcaggggtttttggttgtagcccttatctgaatcgattcgattgtggacgacgattcaaaaatacatctggcacgttgaggtgttaacgataataaaggaggtagcaagtgaccattgctattgttataggcacacatggttgggctgcagagcagttgcttaaaacggcagaaatgctgttaggcgagcaggaaaacgtcggctggatcgatttcgttccaggtgaaaatgccgaaacgctgattgaaaagtacaacgctcagttggcaaaactcgacaccactaaaggcgtgctgtttctcgttgatacatggggaggcagcccgttcaatgctgccagccgcattgtcgtcgacaaagagcattatgaagtcattgcaggcgttaacattccaatgctcgtggaaacgttaatggcccgtgatgatgacccaagctttgatgaactggtggcactggcagtagaaacaggccgtgaaggcgtgaaagcactgaaagccaaaccggttgaaaaagccgcgccagcacccgctgccgcagcaccaaaagcggctccaactccggcaaaaccaatggggccaaacgactacatggttattggccttgcgcgtatcgacgaccgtctgattcacggtcaggtcgccacccgctggaccaaagaaaccaatgtctcccgtattattgttgttagtgatgaagtggctgcggataccgttcgtaagacactgctcacccaggttgcacctccgggcgtaacagcacacgtagttgatgttgccaaaatgattcgcgtctacaacaacccgaaatatgctggcgaacgcgtaatgctgttatttaccaacccaacagatgtagagcgtctcgttgaaggcggcgtgaaaatcacctctgttaacgtcggtggtatggcattccgtcagggtaaaacccaggtgaataacgcggttagcgttgatgaaaaagatatcgaggcgttcaagaaactgaatgcgcgcggtattgagctggaagtccgtaaggtttccaccgatccgaaactgaaaatgatggatctgatcagcaaaatcgataagtaacgtattgtgttgattatcactcagttttcacacttaagtcttacgtaaacaggagaagtacaatggagattaccactcttcaaattgtgctggtatttatcgtagcctgtatcgcaggtatgggaagtatcctcgatgaatttcagtttcaccgtccgctaatcgcgtgtaccctggtgggtatcgttcttggggatatgaaaaccggtattattatcggtggtacgctggaaatgatcgcgctgggctggatgaacatcggtgctgcagttgcgcctgacgccgctctggcttctatcatttctaccattctggttatcgcaggtcatcagagcattggtgcaggtatcgcactggcaatccctctggccgctgcgggccaggtactgaccatcatcgttcgtactattaccgttgctttccagcacgctgcggataaggctgctgataacggcaacctgacagcgatttcctggatccacgtttcttctctgttcctgcaagcaatgcgtgtggctattccggccgtcatcgttgcgctgtctgttggtaccagcgaagtacagaacatgctgaatgcgattccggaagtggtgaccaatggtctgaatatcgccggtggcatgatcgtggtggttggttatgcgatggttatcaacatgatgcgtgctggctacctgatgccgttcttctacctcggcttcgtaaccgcagcattcaccaactttaacctggttgctctgggtgtgattggtactgttatggcagtgctctacatccaacttagcccgaaatacaaccgcgtagccggtgcgcctgctcaggcagctggtaacaacgatctcgataacgaactggactaacaggtgagcgaaatggttgatacaactcaaactaccaccgagaaaaaactcactcaaagtgatattcgtggcgtcttcctgcgttctaacctcttccagggtagttggaacttcgaacgtatgcaggcactgggtttctgcttctctatggtaccggcaattcgtcgcctctaccctgagaacaacgaagctcgtaaacaagctattcgccgtcacctggagttctttaacacccagccgttcgtggctgcgccgattctcggcgtaaccctggcgctggaagaacagcgtgctaatggcgcagagatcgacgacggtgctatcaacggtatcaaagtcggtttgatggggccactggctggtgtaggcgacccgatcttctggggaaccgtacgtccggtatttgcagcactgggtgccggtatcgcgatgagcggcagcctgttaggtccgctgctgttcttcatcctgtttaacctggtgcgtctggcaacccgttactacggcgtagcgtatggttactccaaaggtatcgatatcgttaaagatatgggtggtggcttcctgcaaaaactgacggaaggggcgtctatcctcggcctgtttgtcatgggggcattggttaacaagtggacacatgtcaacatcccgctggttgtctctcgcattactgaccagacgggcaaagaacacgttactactgtccagactattctggaccagttaatgccaggcctggtaccactgctgctgacctttgcttgtatgtggctactgcgcaaaaaagttaacccgctgtggatcatcgttggcttcttcgtcatcggtatcgctggttacgcttgcggcctgctgggactgtaagactgttgtacactaccggggccttttggccccgtttttttatctggaggattaatgacaatcacggacctggtactgattcttttcatcgccgcactcctggccttcgcgatctacgatcagttcatcatgccccgccgtaacggccccaccctgctggcaattcctttgctccggcgtggtcgcatcgatagcgttatcttcgtcggattgattgtcattcttatctataacaacgtcacgaatcatggtgcgttaataacgacatggttattaagcgcactggctctgatgggtttttatatattctggatccgcgttccgaagatcatctttaaacaaaaaggttttttcttcgccaatgtctggattgaatatagccgaatcaaagcgatgaacttgagcgaagatggcgtgttggtgatgcaattagaacagcgtcggctgttaatccgcgttcgaaatatcgacgatctggaaaaaatttataagcttctcgttagtactcaataagttatgaatttagccaaagctatgtttagtgtatttttaataatcagacatagcttaggctatattacctcttcccttatttgttatttattttaacgtttcattgatatataaatccaaatgaaaatcgttatcaataaagcaatgaaataatatattccaacagttgttttatattctcaaaatatgttaaggttgcgccctcatttggggagtagccgatttccagattccggaaatgtacgtgtcaacatactcgttgcaaaacgtggcacgtacggactgaatactttcagtcaggcgagaccatatgcacatcaatcgctatgcctgcatgaacgcgaaaaccatcacggcttgttgttcatgtatgcatgtttgctgggggcgatgatgtgttttatggataccccggtcaggacattgtcatgaatatcactgctactgttcttcttgcgtttggtatgagcatggatgcatttgctgcaagtatcggtaaaggtgccaccctccataaaccgaaattttctgaagcattgcgaaccggccttatttttggtgccgtcgaaaccctgacgccgctgatcggctggggaatgggcatgttagccagccggtttgtccttgaatggaaccactggattgcgtttgtgctgctgatattcctcggcgggcgaatgattattgagggttttcgtggcgcagatgatgaagatgaagagccgcgccgtcgacacggtttctggctactggtaaccaccgcgattgccaccagcctggatgccatggctgtgggtgttggtcttgctttcctgcaggtcaacattatcgcgaccgcattggccattggttgtgcaaccttgattatgagtacattagggatgatggttggtcgctttatcggcagtattattgggaaaaaagcggaaattctcggcgggctggtgctgatcggcatcggcgtccagatcctctggacgcacttccacggttaataagaacgctgccagaggtgaatattaaagtccgtctggcagtcgaacacttcttttgctgccagtgtttgccagacttctggcttcgcacgccaggcaaacggcgtcatctgcaataatgcgacggcttcatcaccgcgaagacgcatcggataacacaactccgcactctgctgtaatgtaaaaccttccagttgttctgcatgaggtgcatgaagatgtacttcattgtaaatcagccccttcagctccatcaaatgtcgcggtcccggcgtggcagtaatgacccagccgccgggcttcactactcgtgctaattcttctgctttacacggcgcgtaaatacgtattatggcgtccatactggtatcggaaaacggcaaacggtggctggaagcgacacaaaaagtgacctgcggatagcgtttcgccgccgcttttatcgctaccttgctaacatccagaccaaacgtggtgatttcgggcaacgcatcggcaaatgcgtgtgtgtaatacccttcaccacagccaatatccagcaccgccgtggccttatcatcaagccgttccctcagttgggcgacaattgcatcacgcagcggctgataatgtccggcatctaagaatgcgcggcgtgcttgcatcatttccgcgctgtcgcccggatcacgagaccgtttatgctgaacgggcagcagattgacatacccttctttcgccatatcaaactgatgtcgctggggacagatatagctgtttttttcacggctaagaggctgatggcaaagtggacaggaaaaagacatgacaactccggcaggatactaaaggccgcaagtgtaacgcgaatcacgcggcgggcaaatatccgaacgccaggagcgaagataaagcatagtaaaaagcctcgcattcgacgaggctttatagcgagattgaagcgtattcacacttcagatcagtggattcgatcagatagctgttacgttaacagctgccggacctttctggccgtcctgaatttcgaactcaacgttctgaccttcagccagagttttgaagccattaccctggatagcggagaagtgtacgaacacatctttgctgccatcagccggagtaatgaagccaaaacctttagactcgttgaaccacttaacctgacctttaatctttgccatttgaaaaattccttagattgttttcttcgcccgcaggcataacatagataaaacactcacattactgcaactggcaccaatataaggctcggcagagaagcggtattcaacgtcaacgtgtttactcaggacttctttactgaaaatgccacacataaacagaactgtacctcgtttaacccgaaatctgttatcacatacaacgttaattatggcaagccatttttaaacatgtctcgatcagacgcacaaatctcgatacgtcttccactttttttgcacacttatgcaacggaatacgcgccgatatatcattgtgcttaaccttgccagttcaggcagatacttaaactggcgtattttctaacatagttcaataagttcagttgttccaggccagtgggagaagttattacatagtgcgtgcaatatcacattttttgctatgcaatgaataaaaagttatatcactttttctcataaaacagtcagttaacggctattaattaccctaaagagaagtcaatccccaaagggattgtaaatttaaaataagaaaaattgatgaatgagcaaaaaaatcaagagagaaacgtttcgctaataaataataccacgcttaatcacaaatccgatgtaaacatcctaataaattaatggggtaaatatctttttctgatatcccgttacgcaaataaataatatgataattatttgaagtcagaccagagttttaatttgaagcagttgcaccatgacagtgcgtataatcaggatgaattgagtaacccttcaacgacggggttactcaagattgaggaaggattatcgttcggcgaccagacgaataatatcttcgtcttcaacgcttttttgactctcaacggtctttttatctgctttctctggttcgtttgcttcgcacaaacgacgtaacagtgcattttgacgtttttgctgatccagcaacgcctcaagcagttcaatctgttcgttagtccgactactggcacgattgataaaaaaccacaagatgagcccgataagaagaaccaccacgcttacaaccaaagacgcaatgttcatcacgccactatttacaacttcgttcatttcaccacctctgagtagaggcgctattctaccactgctggagaggaagaaaatctagtgctgaaaaaatgatatcaccacgggataaactggttaatggcacaaattccgctgaaaaattgtacatcctgatcgcacatcatgttgaatacctgcgcccaaagcagcaagcaagccaacaccacgacaaccagaacgacccatcgaaactttttcactccaatctccgtttcacctaccttatgtcattaaactagcatgcgttagttaaacagcgcctaactatgtcgatattcgtgctttttcggaatgagtcgcttgcttcagcgcatattgccgctacgattaagcgaacataaaaagagaagaggttgtaatgcgattcatcattcgcacagttatgctgatagcactggtatggataggattattactcagcggatatggcgttttgattggaagcaaagagaatgccgcaggattaggtttgcaatgtacctatctgactgccagaggcaccagcacggtacaatacttgcacactaaaagtggttttttggggataacagattgcccgctgttacgcaaaagcaatatcgtggtcgataatggttaagggcaataaataaccagattctcactcctgagtaaaatactcttatagcaagcgcgtttaatataacgccaccttcaactttatttttctcatgctaaataaagaacctgtctgtttgatattccgacaggttcttactctcatcagaacggatagtcgtgataacccatttgggcagaaattttgcgcgctgcggtatgcaacattgcgacatattcctgtaaacgctcttcagagaaacgcaacgtcgggaaggagatgctcaaaccggcaatgaccacgccaaagcgatcaaataccggtaccgcaatgcatcgcagcccttcttcctgctcttcattatcttcgccatacccctgctcgcgcacctggtccagaacgggtaataacgcttctgtactggtgatggtccgctcggtactgcgtttatactccacgccctcaagaatttgcttcacttcatcgcgatcgcgccatgccagcagtaccttaccaatcgcggtgctgtacagcggattacgacgcccaatccgactatacatgcgcaaattgtacatagagtcaattttgtgaatgtaaacaatactgtcttcgtccagtgcgccgaggtggatagtttctttggtcaggcgggagagctcacgcatctggatatctgcgctacgaattaaatcgacgttttgtaacgcgcgagcgcccagttcaaacaatttcagggtcagggaatatttctcgctctccccttcctgcgccacataacctaaggttttcatggtctgtaaaaagcgataaacggtgcttttactcatcatgacgcgctggctcagctcggttatccctatttcgcgctcttcacccagcgcctgcaaaatgccaaaaacttttagcacggaagatacagaatcaggctgtttatccagatctgcgttagccatttatcacctcattgcgagtgttttataaaaatcagaactgttttttattataatttcgcaccagggtggtcgcaatccatcttttgccggttagttacaattctgcgacatccaccgtgaatatcagtgctagaatcatacccctgttgattattcaccaaagatataaaattcctatgccaaaagttcaggccgacggcctgccattgccccagcgatacggtgcgatattaaccattgtgattggtattagcatggccgtccttgacggcgcaatcgccaacgtcgccctgccaacaatcgccacggaccttcatgccacgccagccagttccatctgggtagtgaacgcctatcaaatcgccattgtcatctccctgctcagctttagctttctgggcgatatgtttggctatcgacgtatttataaatgcggtctggtcgtttttctgttgtctagtctgttctgcgccctttctgatagcctgcaaatgctcacccttgcgcgtgtcatacaaggtttcggcggtgcagcgttgatgagcgttaataccgcacttatccgcctgatctatccacaacgttttctgggtagagggatgggcataaacagctttattgttgccgtctcttctgctgccgggccgacaattgctgcagcaatcctctccatcgcatcctggaaatggttatttttaatcaacgtaccgttaggtattatcgccctgcttctggcgatgcgttttctgccacccaatggttctcgcgccagtaaaccccgtttcgacctgcccagcgccgtgatgaacgcgttaaccttcggcctgcttatcactgcgttgagtggtttcgctcaggggcaaagcctgacgttaattgctgcggaactggtggtaatggttgttgttggtattttctttattcgccgccagctttctcttcccgtaccgctgctaccggtggatttactgcgtatcccgctgtttagtctttctatttgcacatctgtttgctctttctgcgcacaaatgctggcaatggtttccctgcccttttacctgcaaaccgtgctcgggcgtagtgaagtcgaaacaggtttacttctgacaccgtggccgttagcaacgatggtgatggctccgctggcaggctatttgattgaacgcgtacatgcaggattgctgggggctttagggttgttcatcatggctgcggggcttttttccctggttctgctgcccgcgagtcctgcggatatcaatattatctggccgatgatcttatgtggtgctggatttggcttattccagagtcccaataaccacaccattattacctccgcgcctcgcgaacgtagcggtggagccagtggcatgttaggaacggctcgtctactgggtcagagtagcggcgcggcgctggtggcgctgatgctaaatcagtttggagataatggtacacacgtcagcctgatggctgcggctattctggcagtgattgctgcctgtgtcagtggtttacgtatcactcagccacgatccagggcataaaaaaagcgcgtcgatcaggacgcgctttttagtatttacttcatattacttcaggtattcacccgtacgcagagcttcaattcgtttatccagcggcgggtgggtcatgaacaactcactgaggcttttgctcttaccgttaatgcagagagccatcatgctggttgcttcttgcggttcatagctggttttcaggcgctgcagcgcggcaatcattttctcgcgaccaaccagttttgcgctaccggcatcagcatggaattcacgatgacggctgaaccacatggtgataatgctcgccagaataccaaacaccagttccagaaccgttgcaaccgcaaagtagatcagcgggttgccgttgctctcttcaccttcatcacgatttccgcccataaaacccgcggcaagctgcgccagaatacgggaaataaagataacgaaggtgttcaccacgccctgaatcagcgtcatggtgaccatatcaccattggcgatgtggctgatttcgtgagcaattaccgcctcggcttcatccgggctcatgttctgcagcaaaccggtgctgacagcaaccagagaggcatcacggcgcgcaccggttgcaaaagcgttgatgtccggcgcatggtagatagccacttgcggcatagcgatccccgcctgacgagcctgggttgctacagtattgaccagccaacgttccctttcgttacgcggttgctcgatcacttccccgccaacagatcgtaatgccatccatttggacatcagaaggctaacgaaggaaccaccaaaaccgaacagcaaggccatgatcatcagcccctgaacgctgctgctctgtatccctgtcaggctcagtaccagcccgaaaacgaccattacggccaggttcgttagcaggaagagcgcgattcgcatcataattttctttttacctcagtttaacaaaacgcaatatgcgatacccacatcgtatgggttacgcgactattttcaagtctggatagtgcgtaagtcaccagaaagacacaactttacattttgtagcatctgatttacggcatcttgtcgctgttaaaaaatcaggcacaatttcttgtgcctgattgatattacttgacgggagcgggttgttccgcgggtctggctttttcaagcttcgccagatcgagtgcgatattcaccgtctcatccagataaggatccggctcctggtaatctttcggtagatcatccagtttcttcaactccggtttaccttcgcgtttaaagcgttcgttcaaacgcgccagacgcgtcgcatcatcttcattattctctttctcacgcacagcgtaattcagagaaacgatattgcgcttgtccttcatagcgttgaagcgcgcgatatccttcatgatgttctggaactcaggatctttcgcgatacgcgcattatgttccttcagcagctccggttcaaaggccgttaaatctccacttttcacataagtcgcggcatcaatgctatcccacggcagcgcgttatcttcgaatttctcacccgtttccgtttcttcattacccgtcggcatgatgatgtctggcgttacgcctttacgttgcgtactgccgccgttaacgcgatagaatttctggatcgtgtactgcacagaacccagcgctggccattcaggacgtaacatctgatcgtaaatacggttcaaactacggtattgctgaacggtgcctttaccaaacgtcggttcacccacaaccagcgcacgaccgtaatcctgcattgccgcggcaaagatttcactagcgctagcactgaagcggtcaaccagcaccaccagcgggcctttatagaaaacctgtccgtcggtatcgctatcttcacgaaccttgccgttgttatcgcggacctgaacaatgggacccgcaggaataaacagaccggagaggcttacggcttcagttaacgccccaccgccattgctacgcaggtcgatgatgacgctgctgacattctgtttttccagtttctgcagttgcactttgacatcgtctgtcaaacccacatagaagcccggaatatccagcacgccgactttctctttaccgacggtcttcacgctcattttaaccgcgcggtcttcgagacgaatacgttcacgggtcaacgttacagtacgggtcttggtccctttaccagcaggtaaaatttccagacgaactttactgcccttcggccctttaattaaggcaaccacatcatcaagacgccagccaatcacgtcaaccatcggcttgcctgtttgaccaacaccgacaattttgtcaccaacgctgatagctttactcttcgctgccggaccacctgccaccatgctattgataacggtgtagtcatcatccatttgcagcactgcgccaataccttccaggctcaaactcatttcagtgttgaactgttcggtattacgcggggaaagatagttggtatgcgggtcgatttcacgcgcaaacgccgtcattgccaggctgaaaacatcttcgctgttggtttgcgccagacgacgaatggcaaatttgtagcggcgagtcagggtttcacgaatttctttatccgtttttcctgtcagcttcaggcttaactcgtcgaatttgactttactgtcccacagcgcgttcaactcagcctcgtttttcggccagggcgctttgctgcggtcaaggttataagtgtcgttgccggtgaaatccatcggcttttccagtacgctcaaagcgtactggtaacgctcaaaacggcgcttttgcgccagattgtagagatcgtagaaaacgtcgagtttgccactacgcagttcatcgcctaactcggttttctttttcgcgaactgttcaacatcgcttgccagcagcacgttgtggctgtaatcgagcagattcaggtagcggtcaaagattttggcgctaaatgcctgatcgaggtcgaactggcgataatgagaacgggtgaagcggctcgttacgcgctcacttaccgtcgcatgctgcgtctcttcctttaataccggaatttgatcagcacgcgtgatatcttctacagcgaaggtctggcctgctattgcaagcaggccagctaacgcggtaagcctaaaaaacatgttcatgcctggcccggcctccgtttcagaacaccaggtgttctgcgcgcacaatcaaagacataccgctattcagctggacgcggacgccgtctttggtgatttctaatacggtggcatccatcgcgttttgacccgctttcaccttcagggcttgtccgacagtcagagcactaatgtcagaaaccggggtgtgctgttcttcgcgaggtgcttttactgtttttggcgctttctctaccggcttttgcgcacgaggtttacgttcagcgccttctttgcggcgtggcgtagtcggacgtggcttgcgttcgcggcgcggtgcgtcttctttctcaccagcagttgcggcagcttcgcgttttttcgcttgctgttcagcacgctgtgcctgaacacgcgctttcgcttcttcaagctgcttgcgagcatgctctacatgttgctcgtccagctcaccgcatgggttgccgtcaagatcgacacgcgttgcgccgggtttaacaccgtaaagataacgccagctgctagtgtagagacgtaaagcggatcgcaattgcgttttgctcaggttcatttccccagcaacacgatcgaccaaatcctgaaaaataccgattttcagcggacgcgcttcaccttccgcactgaaacagtggggaaaacgttcggccagaaacgcgattacttctttactgctattcaacttaggttgattttccatgaaatttcctgattacaacggacgtagccaacaagcgcaggcatgaacaggcgtcattataatgacgctatcagtaaatgctacgttatccgttgattatcctgcgacgctcgcaaagaattttttgtaatccgtcgttgcaagcactttttcaagctgtgccacaagctgacgtaagccttgctcgtcctcgtctgtaaagcgaccgaagacggtactatcgatgtcgagaacaccaataatctgatttttcaccaccagcggcagaacaatttcagaattactcgccgcatcacaggcaatatgcccgtcaaacacatgaacatcctcgatacgctgcacttgattgcgggcaaccgcagtgccgcacacgccgcgcccgacgggtatccggacacaggcaattttgccctgaaatggtccgagtaccagtgtatcgtcctcaagcaaataaaaacctgcccagtttatgtcagtgagacgctcatataacaacgcactggtgttcgcaagcgttgccagaaaactggtttctcccgccatcagcgcgttaaagtcgcgatttaaatccgcgtaaaattctgttttgttcattatataatcacttggttgtcttacctggatctgccagcctattaaaataagcattaaatgcgttaatgctcaagatcattcccatcatgggttaagattaatgttaattcttattacatttggcacgtcatggctcttaacacaccacaaattacgccgacaaaaaagataacagtgagggcaatcggcgaggaactgccgcgtggtgattaccaacgttgcccgcaatgtgacatgctgtttagcctgcccgagataaattctcatcaaagtgcctattgtccgcgctgtcaggcaaaaattcgtgacgggcgcgactggagcctaacgcgcctggcggcaatggccttcaccatgctgttgcttatgccgtttgcctggggcgaaccgctgttgcatatctggctgttaggcattcgtattgacgccaacgttatgcaaggcatctggcaaatgaccaaacagggcgatgcgataacggggagcatggtctttttctgcgttattggtgccccgctcattctggtgacctccatagcttatttatggtttggtaaccgactgggaatgaatttacgtccggtactgctgatgcttgagcgacttaaagagtgggtaatgctcgatatctacctggtcggcattggcgttgcttctataaaggtacaggattatgcccatatccaggctggtgtcggcttgttctcttttgtggcgttggtgattttaacgacggtgacgttgagtcatcttaatgtcgaagaactgtgggagcgattttatccgcagcgccccgctacgcgtagggacgagaaacttcgtgtctgtcttgggtgccattttaccggctatccagatcagcgtggtcgctgcccgcgttgccatatcccgctacgcctgcgtcgccgtcatagtctgcaaaaatgctgggcggcgctgttagcgagtatcgttttattgttacctgccaacctgttgcctatttctatcatttatctgaacggaggacggcaggaagatacaattctttccggaattatgagcctggcaagtagcaacattgcggttgcaggaatcgtgtttatcgccagtattctggtaccgtttactaaagtgatcgtcatgttcactttactgttgagcattcattttaaatgccagcaaggtttacgcacacgcattctgttactgcggatggtgacctggattggtcgctggagcatgctcgacctgtttgtcatatctttaaccatgagcctgattaatcgcgatcagatcctcgcttttactatgggaccggctgcgttttatttcggcgcagcggtaattttgactattcttgctgtggaatggctggacagccgcttactttgggatgcacatgagagtggaaacgcccgcttcgacgactgaataaccgcttactttgggatgcacatgagtcaggaaacgcccgctagcacgactgaagcgcagattaaaaataaacgccgtatcagtcctttctggctgctgccgttcatcgcgctaatgattgccagttggctgatttgggacagttatcaggaccggggtaataccgtcaccatcgactttatgagcgcggatggtattgttccaggccgtacgcctgttcgttatcagggcgttgaagtcggaacagtgcaggatatcagcctcagcgacgatcttcgtaagattgaagtcaaggtcagcatcaagtccgatatgaaagatgcgctgcgcgaagagactcagttctggctggtgacgccaaaagcaagcttggcaggtgtctccgggctggacgccctcgtcggtgggaactatatcggcatgatgccgggtaaaggtaaagagcaggatcactttgtcgcactcgatacccaaccgaaatatcggctggacaatggcgatctgatgatccacctgcaagcccccgatctcggtagcctgaacagcggtagtttggtctatttccgcaagatcccggtgggaaaagtctacgactatgccatcaatcccaacaagcaaggcgtggtgattgatgtcctgatcgagcggcgttttaccgatctggtgaaaaaaggtagccgtttctggaacgtttccggcgttgatgccaacgtcagtatcagtggcgcgaaggtgaaactggaaagcctggcggcactggttaacggtgcgattgccttcgatagtccagaagagagcaaacctgccgaggcggaagatacctttggtctgtatgaagatctggcccacagccagcgtggcgtaataataaaactggaactgccgagtggggccggattaaccgccgacagcacgccgttaatgtatcaggggctggaagtcggacagctgactaaactggatttaaatcctggtggtaaagtcacaggggaaatgaccgttgatcccagcgtcgttaccctgcttcgtgaaaatacccgcatcgaattacgcaacccgaaattatcccttagcgatgctaatctcagcgccctgctgaccggcaaaaccttcgagctggtgcccggcgatggcgagccacgcaaagagttcgttgttgtgccaggcgaaaaagcactgctgcatgaacctgatgttctgacgctgaccctgaccgcgccggaaagttacggtattgatgcgggtcagccgctcattcttcacggcgtgcaggtaggccaggttatcgatcgtaaactcaccagcaaaggcgtcacctttaccgtcgccatcgagcctcagcatcgcgaactggtaaaaggcgatagcaaatttgtcgtcaacagccgtgtcgatgtgaaggtggggctggatggcgttgagtttctcggtgccagcgccagtgaatggatcaatggcgggatacgtattctgccgggcgataaaggtgagatgaaagccagctatccactgtatgccaatttggaaaaagcgctggagaacagccttagcgatttacccaccacaaccgtgagtttgagtgcagagacgctgccggatgtgcaggcaggaagcgtagtgctgtaccgtaaatttgaagttggtgaagtgattaccgtgcgtccgcgagctaacgcgtttgatatcgatctgcatattaagccggagtatcgcaaccttctgaccagcaatagcgtgttctgggcagaaggcggggcgaaagttcagctgaatggtagtggtctgaccgtacaggcatccccgctctccagagcattaaagggagccattagcttcgacaacctcagcggtgccagcgccagtcagcgtaaaggcgataagcgtattctgtatgcttccgaaacagcggcccgtgcggttggcgggcagattacgcttcacgctttcgatgccggaaaactggcggtcgggatgccaattcgctatctcggtattgatatcgggcaaatccagacgctggatctgattaccgcacgcaatgaagtacaggcaaaggcggtactttacccggaatatgtccagacctttgctcgcggtggtacgcgcttcagtgtggtcacaccgcaaattagcgcagctggcgttgagcatcttgatactatcctccagccgtatatcaacgtcgaaccaggccggggcaatcctcgccgcgactttgaattacaagaggccaccattactgatagccgttacctggatggcttaagcattattgttgaagcgccggaagccggtagcttaggcatcggtacgcctgtgctgttccgtggtctggaagtcggtacggttacaggaatgacgctggggacattgagtgatcgcgtgatgattgcgatgcgcatcagtaaacgctatcaacacctggtgcgtaacaattccgtcttctggttggcaagcggttacagtctggactttggtctgacgggcggcgtagtgaaaaccggcacctttaaccagtttatccgtggcggcatcgccttcgccacgcctccgggtacgccactggcaccgaaagcccaggaaggcaaacacttcctgttgcaggaaagtgaaccgaaagagtggcgtgaatggggaactgcgcttcccaaataatgcccactgctccggcgtgcctgcgccggagcgtttatgctaaactgcgcgcctgtttttttgccagtggtacatgctcgtggcccaacacaccgtttatttcccggacgcctttctgacacaaatgcgcgaagcgatgcctagcacgctcagttttgatgattttcttgccgcctgtcagcgcccgttgcgccgcagcattcgcgttaatacgctgaaaatctccgttgctgatttcctgcaattaaccgctccttatggctggacgcttacgccaattccgtggtgtgaagaaggtttctggattgaacgcgacaatgaagatgcattgccattgggtagtaccgccgagcatttaagtggcctgttttatattcaggaagccagtagtatgttgcctgttgccgccttgtttgctgacggtaatgcaccacagcgggtgatggatgtcgctgccgcgcctggctccaaaacgacgcaaatttccgcgcggatgaataacgaaggggcaatccttgccaatgagttttccgccagtcgggtaaaagtgttacatgccaatatcagccgctgtggtatcagtaatgttgcgctcacacattttgatggccgcgtgtttggtgcggcagtgccagaaatgttcgatgccattttgctggacgctccctgctctggcgaaggcgtggtgcgtaaagatcccgatgcgctaaaaaactggagtccagaaagcaatcaggaaatcgcagctacacaacgggagcttatcgacagcgcctttcatgcattacgtcctggtggtacgctggtttacagcacctgtaccttaaaccaggaagaaaacgaagccgtttgcctgtggctgaaagagacttaccccgacgcagtagagtttttaccacttggcgatctcttccctggtgcaaacaaagcgctgaccgaagaaggctttttgcatgttttcccacaaatttacgactgcgaaggcttcttcgttgctcgtctgcgtaaaactcaggcgattcccgccttacccgcccccaaatacaaagtcggtaattttccgttcagcccggtgaaagatcgcgaagctggacaaattcgtcaggcggctacaggtgttggcttaaactgggatgaaaacctgcgcctctggcagcgtgacaaagaactgtggttgttcccggtgggcattgaagccctgatcggtaaagtccgattttctcggttggggattaaacttgccgagacgcacaacaaaggttatcgctggcagcatgaagcggttattgctcttgccagtcccgataatatgaatgcattcgagctgacaccgcaggaagcggaggagtggtatcgcgggcgcgatgtttacccgcaagccgcgccagtggcggatgatgtattggttactttccagcatcaaccgattggtttagccaaacggattggtagccgattgaaaaacagctatccgcgtgaactggtgcgcgatgggaaactttttaccggtaacgcctgacagcgcacaaaaaaagcgcactttttgactggcacattcggctgcctcaactaggctgaaaaatggtgcgatcggactggtcgtaccacaatcggcagctaaatggagagcacgaagatgaaaaccagtgtgcgcataggcgcttttgaaatcgacgacggcgaattacacggtgaaagcccaggtgatcgaacgttaaccattccttgtaaatctgaccccgatttatgtatgcaactggatgcctgggatgctgaaaccagtatccctgccctgctaaatggcgaacactctgtcctttaccgtacccgttacgatcaacaatctgatgcctggattatgcgtcttgcctgatccaaaaagaacccgtcggcatggcgggttatttgtcctggttattcccccgttgtaaaatctctcctaaacttaacggtacggcaccacacttcggggatgaaatgttcgcgctggtactttttgtttgctacctggatggcggttgtgaagatattgttgtggatgtctacaacacggaacagcagtgtctttattctatgagcgatcaacggatccgccagggcggttgttttccgattgaggattttatagatggtttctggcgacctgcacaggagtacggtgatttttaattattgcaattgcacaagagtcagttcgcccccaaagacagcaccggtatcaatataatgcaggttgccaatatccacgcgatgtcgcaacggtgtatgaccaaaccagaaatgatcagcacctgtaattccctgccctttttggcgttcacctaatcggctgcggctccacaagacctgatgcaaatcaacgtccttttgccattcataaacatcatctggataatcggcatgagcaataatatgcttgccggtgcgactgtgtacttcaagaataaagggcaaatgctgacatttttccagcgccgttttcgcttgtttctgttgattatctgccagcgcaataaaccagtcgccgccattcatcaaccacaaagacatctgctgggatgccagcgcatccatcgccatctgttcatgattgcctcttaccgcacaaacccaatgttgttccagtaactgcagacaacgtaaactttgcggcccacgatcgataacgtctcccacactgataagtaaatctcgccacggatcaaaacgacaatgccataatttgcggcgcaactgctcaagacaaccgtgtatatcgccagaaagccagatatgtcgccattgatgacccgcaattctctgataaacgggcgcaggctgtttcatcaatattttcctcccgcgctaaagatcacataatcttaacaagaatgttaaaaaacgctggactcagacagtagagtgtgtgttatggttgactataaagtcagcgaaggaaatgcttctggcttttaacagataaaaagagaccgaacacgattcctgtattcggtccagggaaatggctcttgggagagagccgtgcgctaaaagttggcattaatgcaggcttagttgccttgccctttaagaatagatgacgacgccaggttttccagtttgcgtgcaaaatggtcaataaaaagcgtggtggtcatcagctgaaatgttaaaaaccgcccgttctggtgaaagaactgaggcggtttttttattggaaatcaaaaggctattttaggtaattaacagagtttttcagctcgttctataaacggtgccagactcattttttcgccgggattgttaggatcatcaatctgaatcacgctaatgggttgggcattggtcttcccactggcaacttccttttgtgcgatatcgtttaaaggatactgcacgagggtactcggattaataacatacaaagcattacccggtcggcaagtcagcatcacctcttcgcgattaaacgcccatttgtctttacccacttcaaaacgactgacggtaatcacctgcggtgcagccagcgccgctgcagaactggtgagtaacagaaacgccagaatactttttttcatcattttcgtaatccatcaaaaaggttcgagagtcgcaagcaggctgatgatcaccagcactaccgcacctatcgcccattcgagtttagtcatccacacaaaccagggtgccgcacgatcttcatcctgcctcatgcgcggtacaagaacataacgattagccagcgcaatgaccaccataatcatcaccaggatggctttgagcaataagagttggccccagtaagtcgtaagcgtggggggaaatccggtaatcaacaatgcattaagcacgccgcttgccagtacgccgatcaccgcaaaatgcccgcaccaggaaaaacgcatcagcgcctgaatagcctggtgtcgccaacggcctttgatgagttgcatacaccagagcaccggcagtaatcccccaaaccacgccgccgcacaaatcaggtgaatcgcgtgattagtctgatggattttcgctgttaccccttcattcagcgtcgcatgccccactcccgccagcagaataaattgcgcggtagtgagcataaacagcaaacgtggcatattccgcggttgcataagggcgacgatcaacgttacgagggcgagaacaatttgccataaccagatgccaccaaactgcgtttgcaaaacagcctgccaaatgtttgggctaaatacatctgtccatcccgttcccatcaacccgccctgaacggcgagcattgcagtggcactgatcaaactccagacggcagcgtgctgttgtaaacgcagaaaacgcttcgccagcaagcgacgaatcgtcaagggggccagccaggcaccgtacattgcgaagccaaaaaccagcatcaggctggtgaaatggataaatcgcagcgcgatccaggtaaacgccagcatgatttatttcacgctaaaggtgtagtgtcctttcgttttatgcccgtccacgctaacaacatgccagtcaacggtgtaggttccgggtttcaggctatcggccagtggaacaatcagttgcttttggtcctgctcatttcgcttcgccggtaatgttttaatattttcgttttttggccccgtgatttttgcaccactgaatcctgtttcaacaccttcgctgaagtttaaagtgattgcctgcggtgcagctgtcacttgcgcgtttgccgcaggatactgatgcgttaaatgcgcatgtgcccagacggaaggtgtcaccaagctagtggtcaggattgccagcgcgtagcgaagggagcgtgcagtactagccatattatctattcctttttgtaataacttttttacagagcataaccttgtctaatgtctgagtcgaggatcatcaattccggcttgccatcctggctcactcttagtaacttttgcccgcgaatgatgaggagattaagaatgctgaagaatctggctaaactggatcaaacagaaatggataaagtgaatgtcgatttggcggcggccggggtggcatttaaagaacgctacaatatgccggtgatcgctgaagcggttgaacgtgaacagcctgaacatttgcgcagctggtttcgcgagcggcttattgcccaccgtttggctagcgtcaatctgagtcgtttaccttacgagcccaaacttaaataaaacttatacagagttacactttcttacataacgcctgctaaattatgagtattttctaaaccgcactcataatttgcagtcattttgaaaaggaagtcattatgagcttctggaaagttgcagcagcgcaatatgagcctcgtaaaaccagtctcaccgaacaggtagctcatcatctggagtttgtgagggccgccgccaggcaacaatgtcagctgttagtttttccaagcctttctttactggggtgtgattatagccgacgtgcccttcctgccccacccgatctcagtctgttagacccgctttgttatgccgcaacgacctggcgaatgaccatcattgccggccttcccgttgaatataacgatcgctttattcgtggaattgcggtgttcgcaccgtggcgaaaaacgcctgggatctaccatcagagtcatggtgcatgtctgggccgtcgttccagaaccatcacggtggtcgatgaacaaccgcaaggtatggatatggacccgacctgtagtctgtttactacagggcaatgtctgggagaacccgacctgctggcgagcgcccgtcgcttacaattttttagtcatcagtacagcattgccgtgctgatggcaaatgcccgtggtaacagtgcactatgggatgaatatggtcgtctcatcgttcgcgccgatcgtggtagtttattgttagtcggtcagcgtagtagtcagggttggcaaggcgatatcattccattacgctaagctttttcggcctggagcatgccatgttgcgcattatcgatacagaaacctgcggtttgcagggagggatcgttgagattgcctctgttgatgtcattgacggaaaaatcgtcaaccccatgagccacctggtgcgccccgatcgtcctattagtccacaagcgatggcgattcatcgcatcaccgaagccatggtcgccgataaaccgtggattgaagatgtgatcccacactattacggtagtgaatggtatgtcgcgcataacgccagctttgaccgccgcgtactgcctgagatgcccggtgagtggatttgcactatgaaactggcccgtcgtttgtggcctgggatcaagtacagcaatatggcgttatataaaacacgcaagctcaatgtacagacgccgccgggcctgcatcatcaccgcgcgttgtatgactgttatatcaccgccgcgttgcttatcgatattatgaacacctccggctggacggcagaacagatggccgatatcaccggacgtccgagcttgatgacgaccttcacctttggcaaataccgtggcaaagcggtttccgacgttgccgaacgcgatccgggctatctgcgctggttatttaataacctggacagcatgagcccggagctgcgtttaacactgaaacattatctggaaaatacttaatccgcaggcgtagcgggtaatgttccctgcgccagcgcgaccagaaaagcatattccatcgctacgccttcgtagcttttaaagcgaccagatttaccgccatggccactgtccatgtcggtacagagcaataaaagatggtcatcggttttcagctcgcgcaatttagcgacccattttgccggttcccaatattgcacctgagaatcgtgcaaaccggtcgttaccagtaaatgcggataagcctgtgcggtgacgttgtcatacgggctgtagcttttcatgtactcgtaatattgcggatcctgcgggttaccccactcttcaaactcaccagtggtaagaggaatactttcatcaagcatcgttgttacaacatcaacaaacggtacctgggcgataacgccgtggaataattccgggcgttgattaattgcaacgcccatcaacatgccccccgcactcccgcccatcgcataacaaaggctaggagagccatagcccagttttaacaatgcatcgcaggcatcaagataatcattaaacgtatttttcttcttcagaaattttccgtcttcgtaccattgttgccccagctcaccaccgccgcgaacatggacaatggcgtagacaaagccacgatctaacaaactcaagcggctaaaactgaaatcggcatcaatacttgcgccgtaagaaccatagccatacaccagcaacgggttgtgtcctttgcgaaaatgtttgcgatggtagaccaagctaaccggaacttcgacgccatcacgggcgactatccacaggtgttcactgcggtaattcgccgcataaaaaccaggaacttccgtttgttttaatacacgacgctcaccggtatccatatccagttcaaacaaagtgtctggtgtagtcatggaagaataaccataacgcaatcgcgcggtttcaggttctggattgtaggcaatccaggtcacataggccggatcatcaaaggcaataccaatgacttcccgggtcttgcggttaatttggcgcaaactggttaacccgcgctgacgctcttcaaccaccagccagtcggtaaacagcgtaaacccttccagcatgatgttttcgcgtggcggaattaactcttcccactgttgctcatcacgcatacgggtacggtataagccaaagtttttgccgtggcggttggaacgcagataaaaacgatgctggtagtgatcaaggctgtattcgtgatctttgcggcgcggcagaaaaacaaacggctcggcatcggccatttccgcgtccagcaggcgaacttcactggtggtggcgctggccaaatgaatgactacatagtgcttgctggtcgttttatgcaggctgacgtaataggtatcgtctttttcttcgtagatcagtttatcttggcttgctggcgtaccgatggcgtgacgccagacctgataaggcagcagcgtcaccggatgcttgcgaacatagtagaaaatccaggagtcatttgcccagacaaagctgggttcaacgttatccagcagttccgggtaccagttaccagtttccagattacgaaaacgaatgccgtactggcgtcgggaaagaaaatcttctgccagcgccataatggtgttatcgggcgtaatcgccattccgcccatgctataaaactcactatgagctgcgcgcttattggcatcgagcaatgtttcccactcatcccactcttcactgaatgcgctttgacgctggtagatagcatattcacagcctggttcataaatatgccgatagcggtagccatttttgatgtagggcgcagaaacttctcgttgcggaatgcggtcgatgatttcctttaagatgcgatcctgcaaggcttgttgactggccatcacccgatgaccgtaactattttcttgttgcaggtagtccaggacttctggctgagaacgcgtatcgtcccgcagccagtagtaattatcgatgcgcgtatcgccatgaagcgtcatggcgtggggaatgcgggcggcttttggtagcatgttattgttctttctggttgaaacatcttataagggtggcaaaactcaccggggatgcaagcgaaacaggggagtcattgcttagatgatgacaggtaatggcgcggatatcgaatgttatgcagacagagaaaatcagcctgttcaaatggctgtgcgattctggatagcccgaaatagtcaacttcaggctatccagagagcggaattattccgccaaagtgcgtttttgctgttcgagatcgcgttcaatgccgtcacgaacatcctgggggattttcagcgcgtcacccagtgcattcaggtaactgcgttccataaaatggtcaatatcaatagccgcgcaactcaggaaatagatttccagcgcctcttcttcattgcggaccccggtagccaggcgttgtggatccagcggttgttcgattgcctgctcaatgagtacacgcccctgctcttccacgccggctccacgcaattgctggtcgattgccgcacgttctttggcatcaatatgaccatcacttttagcggcaaagaccagcgcaaggatcaaacgtgctgtacgctcatccagcggcgtactttgcgcgccaaactgcggttcgtcctgatgcgccgcgcgaattttatctttgtatttattccacagcaccgtacccgctaccgctccgccgccaaccagtaacgcgttggtgccatatttcgtaagaagtttacgtgcacttttatttgcgaccagcagcccagccagtccgcctaatgcgcctggcactaacagtttgaccaatccctgatccgcagagctggaggtagaagaactgctttgcccaagcagggattgcagttgatttaaccagttagccatatttgctcctcaataaccatttttagtgcctgtagcatagcggatgaggatgtcagaaaatgtatatcgagacaaaagatgcgcaaataagcggggcggtaggccgttattcaaagaaattcgcgccaggtaaggtatttactgtatatcaggtgataagggtattttaggtgaaagtagtttgtcgttttgagtggcattgtttgatgctgattgcccgatgcgacgctgttgcgtcttctcaggcctacgattgtggtgcgttctggggcggacaaggcactcgcgccgcatccgccaacagtcaatcgaattatcagaagccattaacgccgctgatattccgccattcccgctttgcagtccacgctgacctggtaatgaatatcggcacttttaccacgcacggttagcggtacactccatttatcatctttaccctgaatgtcctgcaaactgacccaagccacgggatcggcctgaccgacaattttttgatcatctgcccaacgcgccacgcgattttgttgataatcacgttttacgctcgcggcaattccggcagcatccagatcttcacactttgggaaagtgacgctcttgctggtttcattattggcagcgaaaacacttgcgcaggcagaaaccaacaacagccctaaaaacgcccctctttttttcatgtttttctccatagcacaatgattcaggagaaagcatggtacaaattgtcaggagcgcaagttgcttcaggccgcgtgactggcatcttcctcttcggattcagcaccgacgacctgtggggacggtaatttgccggttttcagaatggtgctcagcacatctttttgttctgccagccataggctaagggcttcacgttgctcgtcttccatttgcactggagaatttgtcagccaggtgtcaagcagatccgccgtatcaagcattttgtcataagcatcggcttcctttttgctggtaaagctcattttctcttcgccctcacgaatgactacgtatttaacttcaaccgccatttgcagcctctcataataactgtgattttatacagtatatttcttttcggttgagaaatcaacatcagcaataaagacacacgcaaacgttttcgtttatactgcgcgcggaattaatcaggggatattcgttatgacgttattaggcactgcgctgcgtccggcagcaactcgcgtgatgttattaggctccggtgaactgggtaaagaagtggcaatcgagtgtcagcgtctcggcgtagaggtgattgccgtcgatcgctatgccgacgcaccagccatgcatgtcgcgcatcgctcccatgtcattaatatgcttgatggtgatgcattacgccgtgtggttgaactggaaaaaccacattatatcgtgccggagatcgaagctattgccaccgatatgctgatccaacttgaagaggaaggactgaatgttgtcccctgcgctcgcgcaacgaaattaacgatgaatcgcgagggtatccgtcgcctggcggcagaagagctgcagctgcccacttccacttatcgttttgccgatagcgaaagccttttccgcgaggcggttgctgacattggctatccctgcattgtaaaaccggtgatgagctcttccggcaaggggcagacgtttattcgttctgcagagcaacttgctcaggcatggaagtacgctcagcaaggcggtcgcgccggagcgggccgcgtaattgttgaaggcgtcgttaagtttgacttcgaaattaccctgctaaccgtcagcgcggtggatggcgtccatttctgtgcaccagtaggtcatcgccaggaagatggcgactaccgtgaatcctggcaaccacagcaaatgagcccgcttgcccttgaacgtgcgcaggagattgcccgtaaagtggtgctggcactgggcggttatgggttgtttggtgtcgagctatttgtctgtggtgatgaggtgattttcagtgaggtctcccctcgtccacatgataccgggatggtgacgttaatttctcaagatctcagtgagtttgccctgcatgtacgtgccttcctcggacttccggttggcgggatccgtcagtatggtcctgcagcttctgccgttattctgccacaactgaccagtcagaatgtcacgtttgataatgtgcagaatgccgtaggcgcagatttgcagattcgtttatttggtaagccggaaattgatggcagccgtcgtctgggggtggcactggctactgcagagagtgttgttgacgccattgaacgcgcgaagcacgccgccggacaggtaaaagtacagggttaaacccggcaaaaaaacgctacaaaaatgcccgatcctcgatcgggcattttgacttttacagcttagcgccttctacagcttcacgcgccagcttagtaatgcggtcgtaatcgcccgcttccagcgcatctgccggaaccagccaggaaccaccgatgcacagcacgcttttcagcgccaggtagtcacggtagttagccggagaaataccacccgtcgggcagaaacggacctgggagaacggacccgcgatcgcctgcagggctttcacgccgccgttagcttcagccgggaagaatttgaactctttcaaaccgtagtccatacccagcatcagttcggaaacagtgctgatccccggaatcagaggaatagtcccttcggtagcagctttcagcagcggctcggtcagacccgggctaattgcgaactgtgcacccgcttcagtgacttctgccagctgctgtggattcagcaccgtaccggcacccacaatcgcttcaggcacttctttggcgatagcacggatagcgtcaactgcacactcggtacgcagagtcacttccagaacgcgcaccccaccagcaaccaacgcttttgccatcggcaccgcgtgttccagtttttttaccacgataaccggtacaaccgggccggtggtcaggatactttctgcacttgttttccagtttttcatcagagttttctctcgcctgattacaaatttgtcgtcttaaaaagtgatacaggttgcgccctgttcggcaccggacagtttttcacgcaaggcgctgaataattcacgtcctgttcccacgcgactcgcgctcaggtcaggaatgtgcggttcgcgagcagccagttccgcttcgtctaccagcagcgtcagttcgcctgtctgtccattcacacgaatgatgtccccgtcgcgcacttttgccagcagcccgccatcgtaggcttctggtgttacgtggatagcactcggcactttaccactagcgccggagagtcgtccatcggtaactaacgcaattttgaaacaccggtccaataatacaccaagtggcggcatgagtttatgtaattctggcattccgttcgcttttggcccctgatgacggacaacaacgacacaatcgcggtccagcaaacccgcttcaaaggccggcataacgtcatgctggctttcaaaaacaaccgctggcgcttcaatcacctggttctcaaccggcacggcagaggttttcataaccgcacggcccaggttaccgcttaacacttttgtcccaccatgatgagagaaaggttgttcgaaggaagcgatcacattgctgtcgagacttttttccgccccttcccgccagtccagttcaccattattcagccatggttcaagggtataacgagacagaccaaaacctgccaccgtattgacatcttcatgcagcaggcctgctttgagcagttcacgcaccagaaccggtacgccacctgccgcctggaagtggttaatatcggccggaccgttcgggtagagacgtgccatcagcggtacaacatcagaaaggtcagagaagtcatcccagttaatctgaataccggccgcgcgcgccatcgccaccaggtgcatggtgtggttagtggaaccaccggtcgccagcagtgcaacgataccgttcaccaccactttctcatcgatcatcttaccgatcggcatccattcattaccattaccggtcatgcgtgtaacctgacgcgcagctgcggcggtcaaagcatcgcgcagcggagaatccggatgaacaaaagaagagcctggcaactgcatccccataaactccaccaccatctggttggtgttggcagtaccgtagaaagtacatgttcccggcgcatggtaagacgcggcttcactctccagtaaggccatgcggtccactttaccttcggcataaagctggcgaatacgcactttttctttatttggcaaaccgcttgccatcggtccagacggcacaaacaccgcaggcaaatgaccaaagctcagggctgccatcgtcagacccgggacaatcttgtcgcacacaccgaggaacagagcaccatcaaacatgttatgggacagccccaccgccgcagacatcgctatcacttcgcggcttagcaggctcaattccattccatcctgcccctgggtgacaccatcacacatcgccggaacaccgcccgcaacctgaccaaccgcattcgcttcatgcagggctttacgaatgatttctggatagtgttcataaggctggtgcgcggagagcatgtcgttataggaggtgatgatggcgatattgttacgcaacatgcttttcaaagaggctttgtcttctggctggcaggcagcgaaaccgtgtgccaggttaccgcatgccaactggctacgatgaacggtgctagttttcgcttgttctatccgggcgagataagcagagcgagtctcgcggctacgttcaatgattcgatttgttacgcgtaacaattgtggattcataaaggctcctgaaattgagttgtcagagcaggatgattcacaacgcgtttcattcagaggatttatgactgaaacgcctgtaaccggagctcatagggcaaaaacgtttcagtcagtgtaataaaaaaagcctcgtgggtgaatccgcacgaggcctgaaagtgtaaaaattgttctacaatctgcgcaagatcatgttaccggtaaaataaccataaaggataagcgcagatattactcaaactcattccaggaacgaccatcacgggtaatcatcgccacgctggcaacgggtccccaggttccggcctgatacggtttcggcgcatcattgtccatcgcccacgcctcagtaatggagtctacccatttccaggcttcttccacttcgtcgcgacgtacaaacagtgcctgaataccacgcatggtttccagcagcaaacgttcataggcatccgccagatgcgtctgattaaaggtttcactatagctcagatccagcttggtgatttgcaggttatgtttgtggtcaaggccaggaactttattcagtacctggatatccacgccttcatcaggttgcagacggatagtcagtttattctgcggcagatcctgccagctttctttaaacagattcagttcaggtgttttgaaatagaccacgacttcagaacatttggtcggcagacgtttaccagtacgcaggtagaatggcacaccggcccagcgccagttatcaatgtcgacgcggatcgccacgaaagtttctgtattgctgctcttgttcgcgccctcttcttccagatatcccggcacttttttgccctgggcgaagcccgcagtatattgcccgcgtacggttttttcgcgtacgttggagcggtcgatgcggcgcagagacttcagtactttcactttttcatcgcggatgctgtctgcgctcaggtcagacggcggagacatcgcaatcatgcaaagaatttgcagcaggtggttctggatcatgtcgcgcatctgaccggctttatcaaaatagccccagcgcccttcgatccccacttcttctgccacggtaatctcaacatgatcaatggtgcgattgtcccagttattcacaaacagggagttagcaaaacgcagcgccaacaggttcagcaccgtttctttaccaagatagtggtcgatacggtaaacctggcactcctcgaagtattcgccaacctgatcattgatttcctggctggtcgccaggctcgtccccagcggtttctccatgactacgcgtgccggtttagcattcagttttgcctcgccaagccctttgcaaattgcgccaaaagtgctgggcggcatggcaaagtagttaatggtgatacgatttttttgatccagcatcgcgccgagacggctgaatgcagcagtgtcattgacatcgagattacaaaaatccagacgtgcactcagggtgtcccataaaccttcatcaatggtttctttcatgaaagtttcgagcgcctcgcggacaactttggtatatgccgctttatcccagtcagcacgccctacgccgataatccgggtgtccgggttgagctgaccggctttttccagttgatacagggaaggcagcaatttacgacgcgcaaggtcgcctttcgcgccgaaaatgaccaggtcacaggcctgggctgtttgcgttaccgccatgtcattctccttaagttaactaacccggtacttaagccagggtatacttgtaattttcttacggtgcactgtactgcttttacgagcttgcgaaaactgtaaacgcttatccacccgtgcgattacgggaaaagcgcgcaaagtgcggcaaaactgataaaaaaatcatcgttttccattgggtaaaaatctgacactgatcatgttatgaaaaaaaataacaacttttttatctgcttttgtcattaacacggcacacaggcgtaatatctgacaaaactgcatttcgatttctttcagtgcggaaatcgtcattacccgtgagtctctttacatcatgaatatgctggaaaaaatccagtctcagctggaacatttgagcaaaagtgagcgcaaagttgccgaggtcattctggctagccccgataacgcgatccatagcagtattgctgctatggcactggaagccaatgttagcgaaccgacggtgaatcgtttctgtcgcagcatggacacgcgcggttttcctgattttaaacttcatctggcacagagtctggcgaatggcactccctatgttaatcgcaatgtcaatgaagatgacagcgttgaaagttacacagggaaaatatttgagtccgcaatggcaacgcttgatcatgtccgtcatagtctggataaatctgccatcaaccgcgccgtcgacttgctcactcaggcaaaaaaaatcgcctttttcggattaggctctagtgccgccgttgcccacgatgcgatgaataagttctttcgttttaatgttccggtggtgtactccgatgatatcgtgctgcaacgcatgagttgtatgaattgtagcgacggagacgtggtggtgctgatttctcacactggaagaacaaaaaatctggtcgagctggcgcagctggcacgcgaaaacgacgccatggtgattgccctcacctctgcgggtaccccgctcgcccgggaagcaacgctggcaattaccctcgacgtaccggaagatactgacatttatatgcccatggtttctcgacttgcacagctgaccgtgatagatgtgctggcgacaggatttactttgcgacgcggtgcaaaattcagagataacttgaagcgggtcaaagaagcgctgaaggaaagccgttttgataagcagttacttaatttaagtgacgatcgctaaaaacgactgtcactgtcctaatcttatacgacatccgaatgagattaatttatcgccatcgcggcgttatttcattcggatttcatgttcaagcaacacctggttgtttcagtcaacggagtattacatgtccagaaggcttcgcagaacaaaaatcgttaccacgttaggcccagcaacagatcgcgataataatcttgaaaaagttatcgcggcgggtgccaacgttgtacgtatgaacttttctcacggcagccctgaagatcacaaaatgcgcgcggataaagttcgtgagattgccgcaaaactggggcgtcatgtggctattctgggtgacctccaggggcccaaaatccgtgtatccacctttaaagaaggcaaagttttcctcaatattggggataaattcctgctcgacgccaacctgggtaaaggtgaaggcgacaaagaaaaagtcggtatcgactacaaaggcctgcctgctgacgtcgtgcctggtgacatcctgctgctggacgatggtcgcgtccagttaaaagtactggaagttcagggcatgaaagtgttcaccgaagtcaccgtcggtggtcccctctccaacaataaaggtatcaacaaacttggcggcggtttgagcgctgaagcgctgaccgaaaaagacaaagcagacattaagactgcggcgttgattggcgtagattacctggctgtctccttcccacgctgtggcgaagatctgaactatgcccgtcgcctggcacgcgatgcaggatgtgatgcgaaaattgttgccaaggttgaacgtgcggaagccgtttgcagccaggatgcaatggatgacatcatcctcgcctctgacgtggtaatggttgcacgtggcgacctcggtgtggaaattggcgacccggaactggtcggcattcagaaagcgttgatccgtcgtgcgcgtcagctaaaccgagcggtaatcacggcgacccagatgatggagagtatgattactaacccgatgccgacgcgtgcagaagtcatggacgtagcaaacgccgttctggatggtactgacgctgtgatgctgtctgcagaaactgccgctgggcagtatccgagtgaaaccgttgcagccatggcgcgcgtttgcctgggtgcggaaaaaatcccgagcatcaacgtttctaaacaccgtctggacgttcagttcgacaatgtggaagaagctattgccatgagtgcaatgtacgcagctaaccacctgaaaggcgttacggcgatcatcaccatgaccgaaagcggtcgtaccgcgctgatgacctcccgtatcagctctggtctgccaattttcgccatgagccgccatgaacgtacgctgaacctgactgctctctatcgtggcgttacgccggtgcactttgatagcgctaatgacggcgtagcagctgccagcgaagcggttaatctgctgcgcgataaaggttacttgatgtctggtgacctggtgattgtcacccagggcgacgtgatgagtaccgtgggttctactaataccacgcgtattttaacggtagagtaagtacgttgccggatgcggcgaaaacgccacatccggcctacagttcaatgatagttcaacagatttcgaatattctgaagcaaacttgaacttatcatcaggcgaaggcctctcctcgcgagaggcttttttatttgatgggataaagatctttgcgcttatacggctggatttcgcccggtttgcgagttttcagcaattttagtatccaggtgtattgttctggtcgcggaccaacaaaaatctcgacttcttcattcatccgccgcgcaatcgtatgatcatccgcctctaacagatcatccatcggtgggcgcacctgaatcgtcagacgatgcgtcttgccatcataaatcggaaacagcggtacaacgcgcgcacggcacactttcatcaaacgaccaatcgcgggcaacgtcgctttataggtggcaaagaaatccacaaattcgctgtgctctgggccatgatcctgatcgggtaaataatatccccagtacccctgacgtacgctctggatgaatggtttaataccgtcatttctcgcatgcagacgaccgccaaagcgacgacgcaccgtgttccagacataatcaaaaaccgggttgccctgattatggaacatcgctgccattttctgcccttggctggccatcagcatggcaggaatatcgacggcccaaccgtgcggcaccagaaagataactttctcgttattacgccgcatctcttcgatgatctccagcccttgccagtcaacgcgcggctgaattttctccggcccgcgtattgccaactcagccatcattgccatcgcttgcggcgcggtggcaaacatctcatcaacaatcgcttcgcgttcagcttcactacgttctggaaagcagaggctcagattgattaacgcacgacggcgactgctttttcccagtcgtccggcaaaacgtcccagccgtgccagaatgggatcacggaactttggcggcgttaaagcgatacccgccatcgctgctacgcccagccatgctccccagtagcgcgggtggcgaaaggatttatcaaactcaggaatgtattcgctattattttttttcgtttccatgcttttccagtttcggataaggcaaaaatcaatctggtgatagtgtagcggcgcaacttgccccgcaccaaataaaaaaagccggtactgactgcgtaccggctgcgaatggatgttaattaatcaaaccgtagctgcggcacaatctctttggcctgcgccaggaattcgcgacgatcggagccggtcagcccttcggtacgcggcagttttgccgtcagcgggtttacggcctgctggtttatccatacttcatagtgcagatgcggcccggtactacgtccggtattaccggaaagcgcgatacggtcgccacgtttcaccttctgtcccggtttcaccagaatcttgcgcaagtgcatataacgcgtggtgtagctgcgaccatgacgaatagccacataataacctgctgcgccactgcgtttggcaaccaccacttcaccgtcacccacactaagcactggcgtaccctgcggcatggcgaaatcaacacctctgtgtggtgcaacgcgaccggtcaccggattagtacgacgcgggttaaaattagagctgatacggaactgtttcgccgtcgggaatcgcaagaatcctttcgccagaccagtaccgttacgatcgtagaatttgccatcttcagcgcggatagcgtaataatctttaccttcactacgcaaacgtacgcccagcagctggctttgctcacgtttaccatcaagcatttctcgagacattaacaccgcaaattcatcgccttttttcagtttgcggaaatccatttgccactgcatggctttaatcactgcgctcacttcggcgctggttaaaccggcgtttctggcgctggcaacaaagcttcccccgacggtacctttcagcagattgttaacccactctccttgctgcatttcgctggtcattttaaaaccgttagcggcagtacggtcataggttcgggtttcacgacgagacacttcccaggtgaggcgctgcagttcgccgtccgcggttaatgtccaggagagttgttgaccgattttcaggttacgcaattctttgtcggccgcagccagttgggtgatatcacccatatcaataccatactgattgagaatgctgcttagcgtatcgccagtggaaacaacatattcatgcacgcccgcttcaccggcgattttgtcatccagttcgtcctggggaatggcttcatcttcttgtgcagcttgatcaatcggctcactggcttcaggtaagaggctacgaatttcgttctgttccagctcaatggttttgacaattggcgtggcatcacggtgataaacataaggccgccagacagcgacggccagagtaagaacggtgaggctccccaacataacgcggtgtggtcgcggtaaattattaaacgccagggcgacagagcgggctatctgttgcacgtaatcacttcctcattaatctcctttcaggcagctcgcatactggttggctaattgactcaggaattcactatagcttgttttacccagtttgatattcgtccccaggggatccaacgttcccatacgaacggatgtccctcgtgcgacgctctcaacgaccgctggcctgaactgtggctcagcaaaaacgcaggttgctttttgctcaaccaactgtgttcttatttcatgtaaacgctgcgcgccaggttgaatctcagggttaacggtaaaatgaccaagcggtgtcagtccaaactgtttttcgaaatagccgtaagcatcgtgaaaaacgaaataacctttccccttgagcggcgcgagctcgttaccaacctgcgtttcggtactggctaattgtgcctcaaaatccttcaggttggcgtcaagtttggctcgactttgcggcataagttccactaattttccatggattgcaaccgctgtagcccgcgctatctctggggaaagccaaagatgcatgttgaaatcgccgtgatggtgatcttcgtcacttttttccgcgtggtcgtgatcatcatcatcgccgtgaatacttttcatcagtagcggtttcacatcttcaagctgcgcaatcgttacctgcttcgctcctggtaatttgcttaccggtttttgcataaacgcttccatctccgggccaacccaaacgactaagtccgcgttctgtaagcgttttacatcgcttgggcgcagactataatcatgttcactagcgccgtcaggaagtaaaacctctgtttctgttaccccatcagcaatggcagaagcgatgaacccaacgggtttaaggctagcgacaacggcggcatctgcggcctgtgttgcacctccccagagagcggcggataatgctgcgaaaagaagcgtttttttatgtaacataatgcgaccaataatcgtaatgaatatgagaagtgtgatattataacatttcatgactactgcaagactaaaattaacatgacaagtctggtttccctggaaaatgtcagcgtttcttttggccaacgccgcgtcctctctgatgtgagcctggaacttaaacctggaaaaattttgactttacttgggccaaatggcgcaggtaagagcacactggtacgggtagtgctcgggctggtaacacccgatgaaggggttatcaagcgcaacggaaaactgcgcatcggctatgtaccgcagaagctgtatctcgacaccacgttgccactgaccgtaaaccgttttttacgcttacgccctggtacacataaagaagatattttgcctgcactgaaacgtgtccaggccgggcacctgattaacgcaccgatgcaaaagctctctggtggcgaaacgcagcgtgtactattagcgcgagcattgttaaatcgcccgcaattattagtgctggatgaacccactcaaggcgtggatgtaaatggccaggtggcgttatatgaccttattgaccaactgcgtcgtgaactggattgtggcgttttaatggtttctcacgatctgcatctggtgatggcaaaaaccgatgaagtgctgtgcctgaatcaccacatttgttgttccggcacaccggaagttgtttccctgcatccggagtttattagtatgtttggtcctcgtggtgctgaacaactgggtatctatcgccatcatcataaccatcgtcacgatttacagggacgaattgttttgcgtcggggaaatgatcgcagttgatttaacgtcggggaaatgatcgctcatgattgaattattatttcccggttggttagccgggatcatgctcgcctgtgccgcgggtccgctgggtagctttgtagtctggcgtcgtatgtcttatttcggtgatacgctggctcatgccagtttacttggcgtcgcgtttggtttgttgctggacgtgaatccattctatgcggtgattgccgttacgctgctgctggcgggcggtctggtatggctggagaagcgtccacagctggcgatcgacacgttattagggattatggcgcacagtgccctgagcctgggcctggtggtcgtgagtctgatgtctaatattcgtgttgatttgatggcttacctgttcggtgatttgctggcagtgacgccagaagatctcatctctattgcgattggcgtggtcatcgtggtggctattttgttctggcaatggcgcaatttgctgagtatgacgataagcccggatctggcgtttgttgatggtgtgaaattacagcgagtgaaattgttgttgatgctggtgacggcattgacgattggtgtagcgatgaaatttgtcggtgcgttgattattactagcttgctgattattcctgctgctactgcgcgtcgctttgcccgcacgccggaacagatggctggtgtcgctgttttggtggggatggtggcagtgactggcggtttaaccttttccgcggtttacgatacgccggcgggtccgagcgtggtgctatgtgcggcactgttatttattctcagtatgatgaaaaagcaggccagctaatctatcgctgaacacatttgtcggatgcggcgcgagcgccttatccgacctacggttcggtatctctggtagtcctggtaagacgcgaacagcgtcgcatcaggcatattgccagtgccggatgcggcgcgagcgaccaatccgacttacggcatttctggcggcgttatgccaaagtgattccacgcccgcgtcgtcgccatacgcccacgcggtgtacgctgcaaaaagccttgctgaatcaaataaggttccagcacatcctcaatggtttcacgttcttcgccaatggctgccgccaggttatccagacctacaggtccaccaaagaacttatcgattaccgccagcaacaatttgcggtccatataatcgaaaccttcagcatcgacattcaacatatccagcgcctgagcagcgatatctgcgctgatggtgccatcgtgcttcacttcggcgaaatcacgcactcgacgcagcagacggttggcaatgcgcggcgtaccgcgagcgcgacgagcaacttccagcgcgccgtcatcactcatctcaagccccataaagcgtgcgctgcgactgacgatatattgcagatccggcacctgataaaactccagacgttgcacaataccaaaacggtcgcgcaacggacttgtcaggctacctgcgcgcgtggttgcaccaatcagggtaaacggcggcaaatcaattttaatggagcgtgccgccggaccttcaccaatcatgatatccagttggtagtcttccattgccgggtacagcacttcttcaacaactgggcttagacggtggatctcatcaataaacagcacgtcatgcggttcaaggttagtgagcatcgcagccaaatcgcccgccttttccagcaccggaccagaagtcgtgcgtaaattaacgcccatttcattggcgacaatgttggcaagcgtagttttacccaaccccggaggaccaaaaatcaacaaatgatcgagggcatcgccgcgcagtttcgctgctttgatgaaaatctccatctgactacgaacctgcggctgaccaacatactcttccagtaatttggggcgaatggcgcgatctgctacatcttccggcaaagtggtaccggcagaaatcagacggtctgcttcaatcatcctttacctcataacgcggcgcgtagggcttcgcgaattaaagtttcactgctggcgtcagggcgagcgattttgctcaccatgcggcttgcttcttgtggtttatagcccagcgccaccagcgcggcaaccgcttcttgttcagcatcgtcggtcgccgggctggcaggagacgtgagtaccaggtcggcggctggcgtaaagagatcgccatgcaaacctttaaatcggtctttcatttcaacaatcaagcgttcggcggtttttttgccaatacccggcagtttcaccagtgcccccacttcttcacgctcaacggcattaacgaactgctgcgcactcattccggagaggatcgccagcgccaacttcgggccgacgccgttggttttgatcaactctttgaacaatgtgcgctcttgtttattgttaaaaccgtacagcagttgcgcgtcttcacgcaccacaaagtgggtgaaaacgatcgcttcctgacccgcttcagggagttcataaaaacaggtcatcggcatatgcacttcatagcctacgccgcccacttcaattaacaccagcgggggttgtttttcaatgatgatgcctctgagtctgcctatcacatgacgctcctgcgtaatgaatcaaagataatgctgtatgataaaaaaatgctggatagatatccagcgaaggatgaagaaaacttgcgaggtgtctcgatgaactgaaaaatggcacagtataatttattctacaggttatattggaagcaaatattttaatattacatattcagtgaagaaatgcgtaataaaaatatacattgcgcctcctgaaaaaataaattttttatgctattacgtatatttgtatctatttcaatggaatgacaacgtgaatattaattaccctgctgaatatgaaattggagatatcgtctttacatgtataggtgctgccttatttggtcaaataagtgctgcaagtaattgctggagtaatcacgtcgggatcattatcggtcataacggtgaagacttcctggttgcagaaagccgggttccccttagtaccatcaccacgctatctcgttttattaaacgtagctctaatcaacgctatgctataaagcgattagacgctgggctgacagaacgacaaaaacaacgaattgttgaacaggttccctcccggctacgcaaactttaccacaccggttttaaatacgaatctagccgccagttctgtagtaaatttgtttttgatatttataaagaagcgctatgtattccggtgggtgaaatagagacgtttggagaattgttaaatagcaatccgaatgcaaaactcactttctggaaattctggttcctgggttctattccgtgggagcgtaaaaccgtcacgccagccagtttgtggcatcatccgggtttggtgttgattcatgcggagggagtggaaacgcctcagccggaactgaccgaggcggtataacttaacgcagtcgccctctcgccaggttcagccggctttcgctcatctgcatcgcattctgactaacgtggcagtgggtgatagcaatcgccagcgcatcggcggcatccgcctgtggattagcgggcagtttcagcaaggtgcggaccatatgctgcacctggcttttttcggcactgccaatacctaccaccgtttgctttacctgacgtgccgcgtattcaaatactggcaactcctgattcaccgccgccacaatcgccacgccgcgcgcctggcccagtttcagggcactgtcagcgttctttgccataaagacttgttcaatggcgaaataatcaggctggaactgggtgatgatttccgtcacgcccgcatagatgagtttcagacgagacggtaaatcatccactttggtgcggatgcatccgctacccaggtaggacagttgcctacctacctggcggatgacgccgtagccggtcacgcggctacccggatcaatgccgagaataatagccatcacgcgtctccgttttgctgtttagcaggcctcatcagagagtcgctgcgacctcatcagagatttcaccgttatggtaaacttcctgcacgtcgtcgcaatcttccagcatatcgatcagacgcatcagtttcggtgcggtttctgcatccatatcagctttggtagacgggatcatggaaacttccgcgctgtctgctttcagacctgccgcttccagagcgtcgcgcactttacccatttcttcccatgcagtgtagacatcaatcgcgccgtcatcataggtcacaacgtcttcagcacctgcttccagtgctgcttccatgatggtgtcttcatcgcctttctcgaaggagatcacgccttttttgctgaacagataggcaacggaaccatcagtaccgaggttaccgccacatttgctaaatgcatgacgcacttcagcaacggtacggttgcggttgtcagacagacattcaatcatgattgccgtgccgccaggaccgtaaccttcgtagatgatggtttccatgtttgcatcatcatcaccgcccacaccacgtgcaattgcgcggttcagtgtgtcacgggtcatgttgttagacagtgctttatccaccgccgcacgcagacgcgggttagcgtccggatcgccaccgcccagcttagccgcggttaccagctcacgaatgattttagtgaagattttaccgcgcttagcatcctgcgcagctttacgatgtctggtgttggcccatttactatgacctgccataaaaatatctccagatagccctgcctgttcaggcagcgttaattacaaactgttcaatcgcctgccggttgctccaggacttagtgagcgccgccgcagcaggcgcatcaagccacttgtaagccagatgttcagtgaaaacgatctgccgctcgtgcggaagcgcaagacagaaccaactttccgtattacgcgtcacgcccggcgcatagcgatgacgtaaatgactaaaaatttcaaactctaccgtgcgctgacagtcaattaaggtcagttgttcagcgacaacatcaatggtgacctcttcctttacttcgcgcatggcagcttgcggcgcggtttcaccctcttccacgctgccggttacgctctgccagaaatcgggatcgtcacgccgctgcaacatcagcacccgtttcgtatcttgtgcgtagatgaccactaagatgctaacgggacgcttatacactttatccttcacgctgcctcttcgttgactgccttcgctcatcccattcacatagttatctatgctcatgggagttcactcagttgccgcctcgatgcaacgcgaatgatttcgtgtatttgagtcatatcagttattctcagccttcttcacaacctgaatgctcagctcagccagtgcagtcgggttagcaaagctcggtgcttcagtcatcagacacgctgccgccgtggttttcgggaaggcgataacgtcacggatattgtcggtgccggtcagcagcatggtcagacggtcaagaccgaatgccagacctgcgtgcggcggagtaccgtatttcagagcgtcgagcaggaagccgaatttctcgcgctgttcctcttcgttgatacccagaataccaaacaccgtctgctgcatatcaccattatggatacgtacactaccaccgcccacttcgtaaccattgatgaccatatcgtaagcgttcgccaccgcattttccggtgcagctttcagttctgcagccgtcatatctttcggactggtgaacggatggtgcattgccgtcaggccgccttcaccgtcgtcttcaaacatcgggaagtcgataacccacagcggtgcccatttgctttcgtcggtcagaccaaggtctttacccactttcaggcgcagtgcacccatcgcgtcggcaacaattttcttgttgtcggcaccgaagaaaatcatatcgccatcttgcgcggcagtacgatccaggatgtcttcgatgatttctgcattaaggaacttcgctaccgggctgttgataccttccagacctttcgcgcgttcgttaactttgatgtaagccagacctttcgcgccgtagattttaacgaagttaccgtattcgtcgatctgcttacgggtcaggcttgcgccgcccggaacgcgcagagccgctacgcgacctttcggatcgttcgccggacctgcaaatacagcaaactcaacagatttcagcagatcagcaacgtcagtcagttccatcgggttacgcagatccggtttatcagaaccataacggcgttctgcttccgcaaaggtcattaccgggaaatcgcccagatccacacccttcacttccagccacagatgacgcaccagcgcttccatcacttcacgcacttgcggcgcggtcatgaaagaagtttccacatcgatctgagtaaattcaggctgacggtcagcacgcaggtcttcgtcacggaagcatttaacgatctgatagtaacggtcaaaaccggacatcatcagcagctgtttgaacaactgcggggattgcggcagtgcgtagaatttacctttgtgcacacgagaaggcaccaggtagtcacgcgcgccttccggcgtggctttggtcagcatcggagtttcgatgtcgaggaagccgtggtcatccataaaacggcgcaccaggctggtgattttagcgcgggttttcaggcgctgagccatttccggacgacgcaggtcgaggtagcggtatttcagacgcgcttcttcggtgttgacgtggttagagtcaagcggcagaacatctgcgcggttgatgatagtcaggctggacgccagcacttcgatttcgccggtcgccatatcgcggttaatatttttttcgtcacgcgcacgtacggtgcccgtgacctgaatgcagaactcattacgcagttcagaggccagctttaacgcgtccgcacgatccggatcgaaaaatacctgcacgataccttcgcggtcgcgcatatcgatgaagatcaggctaccaagatcacgacgacggttgacccaaccacacagagtcacctgctgccccacgtgggacaaacggagctgtccacaatattctgtacgcatgagatatcccttaacttagctgccggcggatgccccctgctgcgcaggtgaccaagtcgcagcgttagctgtatgtcacaactgaatgaaaaaaggcggctattatactggaaattctgccgcaccgtaagagcctggcccgcgctggaacgcctcgttaccactttatatcgggcctgaaatcagactctacgccagtttgctataaaggtgttgcccgaactcataaaaattaacaaaatttgtcgttccgccatcggctaatcgcattaaggtgtgaggcacgattttgttttttcaggagtcattatgcttgaacttaatgctaaaaccactgcgctggtggtgatcgatttacaagaaggcatcttaccttttgccggtggtccacatactgccgatgaggtagttaatcgcgccgggaagctggcggcgaaatttcgcgccagcggtcagcccgtgtttctggtgcgcgttggctggtctgccgattacgctgaagcattaaaacagccggtcgatgcgcccagtccggctaaagtgttgcccgaaaattggtggcaacatcctgctgcattaggtgcaaccgacagcgatatcgaaatcatcaaacgtcaatggggtgcgttttacggtacggatctggagttgcaattacgccgccgaggtatcgatacaatagtgttatgtgggatcagcaccaatatcggtgttgaatccaccgcccgcaatgcctgggaacttggctttaatctggtgattgccgaagacgcctgtagtgccgccagcgccgagcagcacaataacagtatcaaccatatctacccgcgcatcgcccgtgtgcgtagcgtggaagagatcctcaacgcgttatgatttacatcggtctaccgcaatggagccatcctaaatgggtgcggttggggatcaccagccttgaagagtatgcccgccactttaactgcgtggagggcaacaccacgctttacgccctgccgaaacccgaggttgtcctgcgctggcgtgagcagaccacagatgacttccgcttctgttttaagtttccggcgaccattagccatcaggcagcattacggcattgcgatgatttagtgactgaatttttgacccgcatgagtccgttggctccgcgcattgggcaatactggctgcaactgcctgccacattcggcccacgggagctgcctgcgctttggcattttctcgattctcttcctggcgaatttaattatggcgtggaagtccgccatccacagtttttcgccaaaggagaagaggaacaaacgcttaatcgcggtttacatcagcgcggcgttaatcgggtgattttagacagccgcccggttcatgcagcacgtccacacagtgaagctattcgcgacgctcaacgaaaaaaacctaaagttccggtacatgctgtactgacggcgacaaatccgctgatccgttttatcggtagtgatgatatgacgcaaaaccgggaattatttcaggtctggttacaaaaattagcgcagtggcatcagaccactacgccttatctttttttacatacgccagacattgcccaggcaccggaactggtacataccctgtgggaagacttacgtaaaacgcttccagagatcggagcagttccggctattccacagcaatcttctcttttctgaatttgccacctatcatagacaggtgccatcggccattttaaagggagtttgtatggtaagcgcgctgtacgccgttttaagtgcgttgttattaatgaagttctcttttgatgtcgttcgcctgcgaatgcagtaccgcgttgcctatggcgacggcggttttagcgaactgcaaagcgctattcgcattcatggtaacgcggtggaatatattcccatcgcgattgtgctgatgctgtttatggaaatgaatggcgcagaaacctggatggtgcatatttgcggcatcgttttgcttgctggtcgtctgatgcattattacggttttcatcaccgtctgttccgctggcgacgttccggcatgagcgccacctggtgtgcgctgttgctgatggtgctggcgaatctttggtatatgccctgggagttggttttctccctgcgttaacgcacaatacgccactttctttttcccggatttttacgttatgtctcaccgcgacacgctattttctgcccctatcgccagactgggcgactggacctttgatgaacgggtagctgaagtcttcccggatatgatccagcgttccgtacccggctattccaatattatttccatgattggtatgttagccgagcgcttcgttcaacctggtacgcaggtttacgatctgggttgttctctgggcgcggcgacgctcagcgtgcgtcgcaacattcatcatgataattgcaaaattattgccatcgacaactccccggcgatgattgaacgctgccgtcgtcatattgacgcctataaagcccctacgccagtagacgtcattgaaggtgatattcgcgatatcgccattgaaaacgcaagcatggtggtgctgaattttaccctgcaattcctggaaccttccgagcgccaggcgttactggataaaatttatcaagggctgaaccccggcggcgcgctggtgcttagcgaaaaattcagtttcgaagatgccaaagttggtgaactgttgttcaacatgcaccacgactttaaacgtgccaacggttacagcgaactggagatcagccagaagcgcagcatgctggaaaacgtgatgctgaccgattccgtggaaacccataaagcacgcctgcataacgccggttttgagcatagtgagctgtggttccagtgctttaactttggtagtctggtggcattaaaagcagaggacgctgcatgatcgactttggtaacttttattctctgattgccaaaaatcatcttagtcactggctcgaaacgctgcccgcgcagattgctaactggcagcgcgagcagcagcacgggttgtttaagcagtggagtaatgcggtggagtttctacctgaaattaaaccgtatcgtcttgatttattgcatagcgttacggcagaaagcgaagagccactgagcgcagggcaaattaaacgcattgaaacgctgatgcgcaacctgatgccgtggcgcaaagggccgttcagtctgtatggcgtcaacatcgataccgaatggcgttccgactggaaatgggatcgtgttctgccccatctttctgatttaaccggacgcaccattctggatgtcggctgcggcagcggttatcacatgtggcgcatgattggcgcaggcgcgcacctcgcggtggggatcgaccctacgcaactgtttctgtgccagtttgaagcggtgcgtaaactactgggtaatgatcagcgcgcgcatttgttaccgttaggtattgaacaacttccggcactgaaagcctttgataccgtctttagcatgggcgtgctttaccatcgccgtagtccgctggagcatctatggcagttgaaagatcaactggtcaatgaaggtgaactggtgctggaaacgctggttattgatggtgatgagaacacggtgctggtaccaggcgatcgttacgcgcaaatgcgtaatgtctatttcatcccttccgcgctggcgctgaaaaactggctgaagaagtgtggttttgtagatatccgcattgcggatgtgagcgttaccaccacagaagagcagcgacgcaccgaatggatggttaccgaaagcctggccgatttcctcgacccacatgatccgggtaaaacggtggaaggttatccggcacctaaacgcgcggtgctgattgcgcgcaagccgtaaaggtctggtattactgccggatgcggcgtgaacgccttatccggcctacaaaaccttgctaattcaatatattgcagggactatgtaggcctgataagcatagcgcatcaggcagctttacgtttgcataacctcagcgcccgtttccgggcgctattcacgtcttacgcctgaacagctggctgatcaaacgccgttaacttcggtgcattgcccgtatatttttcgatatacaccaacgcactgttaccggcacaggcatttgccagctggctgctggggatatccgccgttaacacgttcgcactgccgtttttacacaagccattttccagatctggccatgcaccttcatgcacgcataccacgccttttttgatcccgtcagtcaccaccgcgcctgtcaaaatctgaccacgtttgttccagacacgcaccagatcgccattcgcaataccaaagcgtgcagcatcttcggtgtgaatagtgattggttcacgatcggcgatcgcatattttttacgcagttccgcatagttaagctgactgtgtaaacggtgtgccggatgtgcggtcagaagctgtaactgcttctcgtcggcggtacctttccattcatcaggagccagccaggttgggtgtgccgggcaatccttatagccaaatttttccaacgttttactatagatttcaattttgccgcttggcgtacccagcgcatttttcaccggatcggcgcggaaatcaccataacgaacgtactgttcgttcttctcgctgtggcgcatttcgatcagtttattttgctgccagaaggcattaaacattggcatagtgacgcgttgcgcacgggcacctttctgagcggcatcatagaaaaatttcagccacgccatttcatctttaccttcggtatagatctcttttccgccaggtttgagtaattccgcaagatcggcaaacacgtcaaaatcgttacgcgcttcaaattgcggagcaacagcctgcttcatcggcacaatatgctggttgctgtaatcaccggtcatcgtcaagtcattgcgctcaaagcttgtggtgatcggtaatacgatatctgcgtgtttggctgctgcggtccagtagcattcagaaacgacgatcatctccggtttctgccatgctttaatcagacgattagtatcctggtgatgggtaaagttaccgccacccgcccaccagatcattttgatattcggatacgtttgttctttaccgttatgctgatatttgccgccaggattttccagcgcatcgacgatacgggcaacaggaatcgccgtcattccgccatcatcagcggcctcgctggcatgtccggcaatcgccgcagacatttccggcagcacgccgccaacacgcgtcgggttgccaccgttggagtaatgataagagaaaccaaaaccgccgcccggtgtaccaatctgccctaacatcgccgccagcgtcaccagcatccagtgtttctgttcaccatattgctggcgctgaattccccagcctgccatcagcattgtgcgattcgccgccatcagttcagcgagtttgactatctgcgcttccggtacgccagtaatttccgccgcccagaccgcgctcttcggcgtattatcgctcttacctgtcagatactcttcaaactgcggatacccggtagtgtatttttcaaggaacactttatcgtgtttgccttgtgtcatcagggtatgcgcaatccctaacatcagtgccacgtcggtgcccatattcggcgcgatccaggtggcattatcgtcaaagaattcgatggtttcggagcggataggatcaatggcaatcactggtttgccagattttttcagctgatggaagtattccagcccttgctcatcggtactgctccaggcaatttttaaggtattcagcgggttcattccccacagcaccacaacctggctgttttccagaatcagcggccaggaggtctgctgttcatacacctctacagaaccgaccacatgcggcatgatcacctgtgctgccccggtactataatcgccgctatgcccggaataaccgcccgccaggttcatataacgttgcagtaaggtttgcgctttatgcaacacgccagaagagcgccagccgtaagatccggcaaaaatggcgcttggtccgttagctttacgaatacgatcatgttgctcatgaatcagttttaatgcctgttcccagctcacctgtacataggtatcttcgccacgacctttcgccggttgcagtggattatcgagatagctttttctcaccatcggatgctgaatacgcgccgtggtgtgtacctgatccgccgccgtagactgtaaggaattcggtatggttttcgccagcgcgcctgtactagaaacaatcttgccgtccttcacttctacgttcatcgctccccaacgtcccgcggtgaggattttaccgcccttctcttctgcccatgcggggagcggtgctgcgcttgtcaccaccagcgctccagcggcaataccgctgtgtttaataaattcacgtcttgttaatgtcataacttcctccctgatcaacgaggatcactgtttctcggtaatatctttggcgttgtactggaaataccgcgttaaaatgtccagttcgttttcgctcatgctggttcgtgcccccattcctttggcaatggacggccacgcattgacggtgtaatggtcggcggcaataggggcatgacaaccagcgcaataggtatcgtcaagtttttcagcgtattgccatagcggtttacggtccgctaatgcgggatcggtaagcgcaccctgtaaagacgcctgacgccattgattgccgtattcgtcagcctgccattccccgtttacagtgagcgccttgataccttcttcacttaatgtggctagcgccagccgttgacctgccgccaggtagagcgtgttttcactgccctgcatttgataaccctgcaacagaacgatcggctgtttgccactggcatcaacgacggtgagatcggttccaggattcacggtagccagctcgcctatgtgagaagttttgaaaggataaatatgtgcgccattagtaacactagtagcggcctgactttccagctcatgcgccgcgttgtcatccatttttatttctggcggaaaatgggcaatgcctttatgacaatcgatacaggtttcgctgtccttttgtgctttgttatgcattttctgcgcagattcactttggctggcaatatccatggcatcaaaagaatggcaactacggcacgttgcagagtcagtggcttttaattctttccatactgtttcggccatttcctggcgatgagcttcgaacttatcgtcactgtctattttgccgctaacaaattcatgataaatatctttagatgcctttaatttagcaaataaataatccatcccactctttggaatatggcaatcggcacattccgcacgtatccctttctggttgctaaagtggacagttccctgatattcctcaaaaggtttactcatgctgtggcaggaaaggcaaaatgctgtatcgctcgttttatgtaagactttttgcgccagcaataacccgccgccaccaaccacaaccgctatcagcaaaaacaataacccaatgcgttttttccctcgcatagattcctctaattaaattactggacaccgaaatcattgtataattaaatatacaacgaattaaccgcttgcataattaggcacaacactgcctgaaacaatcgataaagaatatgatttattacaatgtaatcattaattgctaaggaataacccagttgctatttagaatatatatttatcagttttagtaatttaaatcccataattaatgtgaatatatacaatatttttagcacaacgctatgcgcactgtcacccgctcaacagatcacggttatcgttcgttttttatactgttcagggataaaaaaaggcccctgttgaaattgcaggggcctggtacgagcaagcatcatattgggcgacatgatgcaacggtaaaaatcatttggcctgatggcgttcaatgattcctttcatttcagcaaccgccgccccgtctacgatataacggctatactcgtccgcgtgttcatcactactcatggacaatccttgattacgataacgcatcggactggcttgccacgctcccgcggagctatggacttccagcactccggcatcgaggaagtggtgcaggttttctgcacggactcctgctccggccataatgattggagcatcacgatgggcaataagttccataattttacttaaaccttgcagtgcgtcacttttttgcccacttgtcagtacccgggcaatgcccaattccgcaagattattgagtgtatataaagggttagcgcacatatcgaaggcgcgatgaaaagtcactgccagcggaccggcagcagccattattttttccattcgtggcatatcgacattcccgtcaacatcgagaacgcccgtcaccagtccaggaaaacctaattcgcggaccgtgcgcacatcctcaagaatggcggcaaactcaccgtcgctgtagcaaaaatcaccaccgcgtgggcgaattatcggatgcacagggatcgtcacccgctggcgcacggatttcagtacacccaagctcggcgttaagcccccctcttttggggctgcgcataattcaactctgtctgcgccgttttgctgcgccgttagtgcacattccatgctgtaacagcaaatttccagtaatgccatttttactccttaattacgcgctctgctcgctggcaacgatctcttcaatggaccacggatgaaacttaatagttgttttgccatcggtgaccgccagcgtcggattcggtaatcgctcatgctcaccttttgggctactggttttcacactgatccccggtaggctgagtccttcatcagaaagcaatgccagcgcacgggcattcagcgtttctggatcacccggcagaacgatttcaatatgttcccaaccttcgtgtgggtaacgtttttccccgggccacggtagctccacaatagaaaactgccagtgcgcaacctgtaccggttcatgcaatttaaacagacaaatcggtctgccattgatcatattttcactcaaaagctcgccacactgttcaaacccgcgacgccagcgttcagcagtggcgttttgatggcaacgcaaagaaatgtgatcggcagtcagcggagtgatattcaaccccagacggcgggaaagttcatctaatgcgtggataaatcgcggtaaatcgcttgcaatatcctgcagctcgtcgatagattgccagttcgccataatcactcttcgtctttcagtaaaagcgttaatttaccctgttgccctgtgccaaccaaccgctgatttcacgccgcttctgatgcaatagtgaaaacggcaatacgccacgcgcacgttgctgacgaaaacagccatttgcagtatactcccgccctaatttctttaactggtgcgggcaatttttgctcgcttcatcaatgtaaggtattccggtgaatattcaggctcttctcagtgaaaaagtccgtcaggccatgattgcggcaggcgcgcctgcggattgcgaaccgcaggttcgtcagagtgcaaaagttcagttcggcgactatcaggctaacggcatgatggcagttgctaaaaaactgggtatggcaccgcgacaattagcagagcaggtgctgactcatctggatcttaacggtatcgccagcaaagttgagatcgccggtccaggctttatcaacattttccttgatccggcattcctggctgaacatgttcagcaggcgctggcgtccgatcgtctcggtgttgctacgccagaaaaacagaccattgtggttgactactctgcgccaaacgtggcgaaagagatgcatgtcggtcacctgcgctctaccattattggtgacgcagcagtgcgtactctggagttcctcggtcacaaagtgattcgcgcaaaccacgtcggcgactggggcactcagttcggtatgctgattgcatggctggaaaagcagcagcaggaaaacgccggtgaaatggagctggctgaccttgaaggtttctaccgcgatgcgaaaaagcattacgatgaagatgaagagttcgccgagcgcgcacgtaactacgtggtaaaactgcaaagcggtgacgaatatttccgcgagatgtggcgcaaactggtcgacatcaccatgacgcagaaccagatcacctacgatcgtctcaacgtgacgctgacccgtgatgacgtgatgggcgaaagcctctacaacccgatgctgccaggaattgtggcggatctcaaagccaaaggtctggcagtagaaagcgaaggggcgaccgtcgtattccttgatgagtttaaaaacaaggaaggcgaaccgatgggcgtgatcattcagaagaaagatggcggctatctctacaccaccactgatatcgcctgtgcgaaatatcgttatgaaacactgcatgccgatcgcgtgctgtattacatcgactcccgtcagcatcaacacctgatgcaggcatgggcgatcgtccgtaaagcaggctatgtaccggaatccgtaccgctggaacaccacatgttcggcatgatgctgggtaaagacggcaaaccgttcaaaacccgcgcgggtggtacagtgaaactggccgatctgctggatgaagccctggaacgtgcacgccgtctggtggcagaaaagaacccggatatgccagccgacgagctggaaaaactggctaacgcggttggtattggtgcggtgaaatatgcggatctctccaaaaaccgcaccacggactacatcttcgactgggacaacatgctggcgtttgagggtaataccgcgccatacatgcagtatgcatacacgcgtgtattgtccgtgttccgtaaagcagaaattgacgaagagcaactggctgcagctccggttatcatccgtgaagatcgtgaagcgcaactggcagctcgcctgctgcagtttgaagaaaccctcaccgtggttgcccgtgaaggcacgccgcatgtaatgtgtgcttacctgtacgatctggccggtctgttctctggcttctacgagcactgcccgatcctcagcgcagaaaacgaagaagtgcgtaacagccgtctaaaactggcacaactgacggcgaagacgctgaagctgggtctggatacgctgggtattgagactgtagagcgtatgtaatcgatttttcgtgagagtgaagcctgatcagggttagccgatcaggcttttttattgccatctaaatgtattctgaaaatggacatgccattgttttctcactgttggataagaggccagaagcgtaatatccggccccagggaaacgataacggttgaatttaaggaataccgcagtgtttaaatttcttgtattaacattaggcattatctcttgccaggcttacgcagaagatacggttatagtaaacgaccatgacattagtgccatcaaagattgttggcaaaaaaatagtgatgatgatactgacgttaacgtgatcaaaagttgcctgcgacaagaatacaatctcgtcgatgcgcaattaaataaagcctatggtgaagcttatcgttatatagaacaagtgccacgcacaggtgtaaaaaaacctgataccgaacaacttaacttgcttaaaaaaagtcagcgagcctggctggattttagggacaaagaatgtgaattaatccttagtaatgaggacgttcaggatttaagtgacccttattctgaaagtgaatggctcagttgtatgatcatacagaccaatacgcgaactcgccagttgcagctataccgtaactctgaagatttttatccaagccctttgacaagaggataattcacatctttttggcatgttttgttgcaagctattcctgataaataattgcaacaagacatcgagcctttttcactgagttattaaacatactcgcgagcgcgtcgctacgctagcaagcaaaaatgaaacaggaataatcgaaatgggatgttgcgcacagtcaaaataactcaccgtaaataatcatctgctataaataatcactttcatgcaataccagataagctatttttaaacagacacttaccgcacaacaaactaattaaatacaaagaaaggcaacaatcaacttaatgttaatgaaatgttttacatatattaaccacttgtttaatgcggagaatcagtacactattttcttataattacatttgaaattatatgatcaccgggagtgattgattaattatctttactaataatcagactaatatttacctgtttgaccgagttgggattgcgtcgtttctccattaggagtaaagctttaatgtcacctgaagttcacagaataaggaacaggttatgagctatagcaatattcttgtcgctgttgcggttacaccggaaagtcagcaactgctggcaaaagcggtatctatcgccaggccagtaaagggacacatcagtttaattactctcgcttccgacccggaaatgtacaatcaattagctgcgccgatgcttgaagatttacgcagcgtgatgcatgaagaaacgcaaagctttcttgataagttaattcaggatgcggggtatcccgttgacaagacgtttattgcctacggtgagttaagcgaacatattctggaagtatgtcacaagcatcatttcgatttggtgatttgcggtaatcacaatcacagtttctttagccgagcatcctgcagcgcgaaaagagttattgccagtagtgaggtcgatgtgctgttagttccacttacgggagattaaccgctcttacgcaagctttggaaaggtagcaactttatcgcgctgctggctttccgcgcttcgcggaactatctgctttaggtcgctaatgaagcactcctgccagtggttaatatcgtttttcacgataacgtccagcatttctgcatgacgggaaatacgttccgccaggctcatagtcaatgcacgatccagcgcagctgcaacttcgtcacgatcgtaggggttaacaattaacgcgctcgttaactcgtttgccgctcccgcaaattggctaagaacaagaacgcccggattggctgggtcctgagcagcaacatactcttttgctaccaggttcatcccgtcacgcagtggcgtcactaagcccacgtcagagtagcggaatattttcatcagtaatttacggtcaaaatgctgattcaaataataaagcggcgtccagcctaattgcccgtatttaccattaattcgtccagcttcattttcgagctgatgacgaatatcctgataggcttgcacatcaccacggctcgttggtgcaatctgggtataacgaattttaccatgatgctgcggatatttttccagcaacgcttcataggcgagaaaacgctctggcaaacctttggaataatccagccgttcgacagaaaagatattttgtacgtttttcagttccgctttaagttgcgccagttttggcggcagtggcccggcagcctgtttggctatttctttcggttcaatgccgatcgggtagacttctgttcgaaatgctttgccccaggctgtatggctttttgcgctacgtgtcgtgacgcgggtcaggttagaaagacaatccaggaacgccagacgatcgttttctgtctggaaacccagcaaatcataatcacaaagctgttcaagcaaggtgtcatatgtcggcagcgcgttgaagatttccggtgtcgggaaaggaatatgcagaaagaaaccaatgcgattattcactccccgtttgcgtaattcatgcgcaaatggcaacaggtgataatcgtggatccagataatgtcatcgtcttgcaacagcggcagtaatttatctgccagcaacgcatttacgcgtagatagccgtcccaggcaggacgctgaaattgcaccagatcgagccgataatgaaaagcgggccagagaacggcattggagaattggttgtagtattcgtcaaggtcctgttcgctgaggttaaaagaggcccacgtaatgttaccttttttcaccttttttagcggctgatcctcattccctgtttcaccactccagccaaaccacagtccgcctgcggctttcagtgcccccagtatgccaacggcaaggccaccggcactggcggcgtgctcgtctggtggtgcaatccggttagatactacgactaaacgactcatagtcatcactcctgttatttttacttagatactacgactaaagctctcatagtcatcactcctgttattttctcttttttgttgtaatgcggtggttatcatttcaagccagctccagacatccggcacacccgccagtcgccaacttgcctgagttgcacctgtgccaatttttacactcattccgcccagtcggttaacgactgcgaagccagattcatcggttaaatcatcgcccagaaatacgggcgttcgcccgataaagggagcttcctgcataaaagctgcaattgcctcacctttactggtacctctcggtttgatctcgacaacacactttccctgctgtaacgccatttgtggccagatctgagtaatacgttgcgctaatgtcattaatgcgtcttcatgctgcggagcctgacgataatgcagcgcaaaagccatccctttcgcctccagctccgcgccgggatactgagcgatgactgtatgcagttgcacgctaatatcacgcgcaatcgcatccggcagatgaacgatatgtgttttaccattgatgtcacggcgctccgccccatgcacgcccgctaacgggaagcgataaggttttgccagtgcgtcaagctccaccatactgcgcccacttatcaatgccaatgcaccatcacttgcggttgccagtagctgtagtccttgcagaatattgtcaggcacgacgacctgatcgggatgcggtttgatttccgccagcgttccatcaagatcaaaaaaccaggcatatttcgcggatagttcaggggtttcggttaacggttctgtcacccggttctcctccttctcttttcttattgtgttgcgcagaacgcgctttacagacatgtaagtatagacagtgtgacgggggtcgccatttgcaacgaagaacagccaaccgttatggcggttggctatggtgggaaaaaacgctaaattgttgcagaaaaaagcatcagacagtgcgtttcgctttttgcttgtaacggtcgaagatcaccgctgccagcaggattaagccgcgaaccacgtactgcgcgaaaggagaaatattaagcaggttcatggcgttttccacggtgcctaaaattaagatacccgccaccacataactgatttttccgatgccacctttcagagaaacgccacctaaaacgcaggcggagataacaatcagctcataaccaatgctcgtcattggctgcccactggtcatacgactagccagaataattccggctatcgcacttaccaggccactgagaacaaagataataattttggtgcgaacaaccggtacacccgccagacgcgcggcctcttcgttcccgccaatcgccagggtgttacgaccaaaggtggttttattcagcagcaaaccaaagataatcagacacgcgacggtgagccagattggcgcaggcagaccgaaccagttggcgtaaccaagggcaaagaagctttcatcttcgataccgaccgctttaccgtcactaatgatgtacgccagacctcgaacaatctgcatcgttgccaatgtcgtgatcagagcatttattttcagtttggcgataacaaagccattgaccaggccacagagaacgcccagcaacaaccccgctgccacgccaatccacaggctttcagtcaggttaataaccaccgccgtggtgacacccgcacaggcaattacggaggcgacagaaaggtcaaagtcaccggaagcgaggcagaacaacatgccacaagccaccatcccgctcatggaaattgccaggcccaaccctttcatattaatgaaggtggcaaaatttgggacaaaaatggcacaggcgataaagagcaccgcaaacaccaccagcatgccgtactgatcccagatacgcccgaagctgaaactgctcttaggtgcgccagacccgcttgtagaaacagaagacatcatactctccttactcaggcaacagcctggctgactttaggcatcgcaaggctcagtgcctgacgctcatctgcctgctcgtgtaacaattcaccggcgatttcaccttcccgcatcaccacaatccggtcggcaacgccgaggacttcaggtaagtcgctggaggcaaacagcaccgccacgccctgcgccgccagcgcataaattacgttatatatttcgtgcttagcgccaacatcaatgccgcgcgtaggttcatccagcaaaatgaccttcatctcttcgcttaaccagcggcccagaatggctttttgctgatttccgccactgagattcatgatcagttgctccgcgcccggcgttttgatgttgaggctacgaatgtggtgatcggcattgttttcttcccaaccgttgttgattacacaaccgccgagcacatgtttacgtctggcactgatgttgatattgtcgcgaacggagtgcacgggaataatgccttccgctttgcgatcttccgggcagagcatcatgcctgcggcaatggcgtggctcggtttacgaatatcgatcggctgttggtcgatataaacctgaccggcggtgatttgcgtcccgccaaacatgcctttcattaattcgctacgccccgcccctaccagaccaaacagcccaacaatttcaccactgcgaaccgccagacttattggcgtacgcacgcctggtgctttcacagcatcaagacgtaggcgctcctcgccataactacgcggttgccagccgtagatatcgccaatgtcgcgcccgaccatcgcctgcaccagcgcgtcgtggtcaacctgctgcatatcggtaaaggttttgacataacgtccatctttaaagacagtaatggcatcgctgagggcaaatatttcttccatacggtgagaaacgtataagattacccgcccctcttttcgcagttcacgaataacgcggaaaagattgtcgatttcacgggcagagagggagctggttggctcatcaaaggcgataattttggcgttacgcgccagcgctttggcgatttcaaccatctgccactgaccaatggagagatatttcagcggcgtgtccgggtcaatatccataccaagatgtttaagttgtaaacccgcctcataattcagcaaactgcgattcacaatgccgcctttatgcggcagctggccgagatagatgttttccgcgacggtcatttccggcacgagatgcagttcctggtaaataatcgccacgcccgcgttaagtgctgcggtcgtgtcggaaaaggacatttcctgcccattaatcactacagaacccgtggttggcgcatagttgccgctgaggatttttaagagagtactttttcctgcgccattttcacccatcaacgcatgaacctgaccggcatagcagtcaaaactaatatccgtcagcgccttaacgccgggaaacgttttaccgatgccgcgaaaactgagatacggggtagactgttgcataacgtctccgtgaatcactggtcgttcacaccccctctgcatcatgcagaggggaatttttccggcaaattacttaccgcctaaaccttttttctccagttcttctttaaagttgtcacgcgtgatcagtaccacgtcggtaacttcggtaaattttggcggttcaacgtcttttgctacccagttgtaaagcatttcgctggatttatagccatgtacgtccgggcttggcagcagggaaccgtagaagccggttgcctgtgctttagacagttcgctcaccgcatccacaccgttaatgccaatgccgatgatatcggccgctttaaagccctgaccttccgtcgcgcgtacgccgcccagcacggtgctgtcgttcataccgacgatcagccaatgtttaacttccggatgttgaaccagcatactgttggcagcgtcaaatgcccccgggatgtcgttagatttggtaggtacctgataaatttgtttttccgggaatccggccgctttcagcgcatccatagatcccgtagtacggcggcgggcggtatccagttcgttggcggtaatcgccatcaccgcgctttctttgacatcccagccacgtttctgcatctctttatacagttcctggccctgacgttcgccaattttagtcgccgccatcatcaccagcggaacggtatccattggcttacctttggcgttaacaaactggtcatccacggcaatgactttcatatcgtagccacgcgctttcgcgacgatggcagagccgagtttggggtccggagtacaaataacgaaaccttttgcgccactggcagccaggctgtcgatcgcgttcaatgttttttcgccatccggcacggcaatcttaataacctcaaaccctaaatccttcccggctttatcggcaaacttccattcggtctggaaccacggctcttccggttgcttcaccagaaaaccgagcttcaggttctccgccatagcggattgactcataacggctgccagaccaatggctgccagggctttagtaaatttgtgcatggttctctccagctttagtgtcgttttgtgtagggcaaaaacgaatgacattcgttaaattaatcggaaaacaaagcattaccttttaactaaaagataagtgactgtgttgacatagttttagcgagaaattaattctccataggagagcaatatcacatcgcagaattacagtgagaacgtgcataaatttagcgggaaaagacataagggaaagccaatttgtcagacaaattgtcgaatgcacagcagattaatccataagattagcctggaaatccttgttgtctttggtacccatgcgggatgtcttctttttaaccagtcaataggccgcattacctggcgttgagtttttgaaatggtgtaataaccgcaactcaaagatgtggaaaatgcacgtcattcatttcgtcattaattatcactgtgctcattaattaacagaacacgtataatgagagccatctcgcaaaaatgaaaaaacgttttataaaatcatcacttcatcatgaattcaaattcattgattaatatcaacaagatacaaaaagcactatcattaaaattcattgcagttacattgatttcatcaatgaaatgtaaaaatatataaacttgatgatttaagcattttcttatacccgttcagacgttattcttatttcagatcatcgtcagaattgactccacgatcacatttcggaccggcagaaaggaattattctgcaaacagtaattatggtgttttgatttatcttgcacctctccacttctggatataaggatattaggtatggcaaccgctggaatgcttctcaaactcaactctcaaatgaaccgcgagttttacgcatccaatctctaccttcacctgagtaactggtgttctgaacagagtctgaacggcaccgccactttccttcgcgcccaggcacagagtaatgtgacccaaatgatgcgcatgtttaactttatgaagagtgtcggcgctacccccatcgttaaagccattgatgttcccggtgaaaaactgaactctctggaagaactgttccaaaaaacgatggaagaatacgagcaacgttctagtacgttggcacagttagccgatgaagcgaaagaactgaatgatgatagtaccgtcaatttcctgcgcgatctggaaaaagaacagcagcatgatggtctgttgctgcaaaccattcttgatgaagtgcgcagtgcgaaacttgcgggtatgtgccctgtgcagaccgaccaacatgttctgaatgtcgtgagtcaccagctgcattgatcatcatcggcgctaatgcattgcgccgatgaaggttttgagaaaccgctgcctcatctgtttgaagcagcggtttttttaatgggattcaccctgtggggtaaacttgagttcaataagcgcgatggctttttggattgcccgcatggtgaccgggtctgcggcggcgggatggttagtaaagtcgatattcttcagctgactggacattttttcacgaacttcaacgggcgcgattacatcgagaacatccagaatttgtttgataaccaactggcaagcaaccacatcagaaaccaattcctgatcggcattcagcggctgggacatcgtaaactcctgatagcattttgaaagccgttatagtagcgacttcacatcttcagcgatagtcacatccaccgtcatcaggacacaaaaaaacctgccggagcaggttttttgttatcggaacatattgcctggcggtacgtctttgaacgtcttgcaatagttattgaacatacttttcaggattttgcgcagtttcatcgcggcactccgaccatttgttatacaggtgttattgtctttgcgcttataatatgacaaccatcacaaaaatcaatctttatgtgatacaaatcacataaatacccctttaatgttataaaaatgataatcaaaaaacagcccccctatttctgacacctacagatggcaagaaatagcgcctgccaggcgtcttttccggccattgtcgcagcactgtaacgcgtaaaatagtgctttctcttactcttctggctggaccatgagacttctgattctgactcttagtttaataacgctggcggggtgtacggttactcgccaagcccatgtgagcgaagttgacgcggcaacaggtattgtacggttagtttatgaccaggcttttttgcagcatgcccataccgatcgttatgtcagtcgcgggatcgccgatcgcgcatgccagcaggaaggctatacccacgcggtcccctttggtcagccagtaggcaactgtagcctttttgcgggttccttatgtttgaatacggaattcactttgagttatcagtgccatcattccgccttccctgtctttctctaaatattttaatcagcgaggggatcttcgctgattaaagaaatagcggtaatgcgttttattcccattcgtatttttaataattgaagtttatattttaccttttgcaaataataaaataacaaattatagtgacgccacagcaacaaatataacctttgtggagcactatcatgctgaaaccagaaatgattgaaaaacttaatgagcagatgaacctggaactgtactctagtctgctttatcagcaaatgagcgcctggtgcagctatcataccttcgaaggtgctgccgcgttcctgcgccgtcacgcccaggaagagatgacgcatatgcagcgtctgtttgattacctgactgataccggcaatttaccgcgtattaataccgttgaatctccgtttgctgaatattccagtcttgatgaattattccaggaaacctataaacacgaacaattaatcacccagaaaattaacgaactggctcatgctgcaatgaccaatcaggactacccaacatttaatttcctgcaatggtatgtttctgagcagcatgaagaagagaaactgttcaaaagcattattgataaattaagcctggcaggcaaaagcggcgaaggtctgtattttatcgacaaagaactctctaccctcgacacacaaaactaatgctctccggcggcaggtttactgccgccgtttcaaatcagtgacggcaaatcttactctgatcggtgctaaaaccgtctttgctaggtataaatttgccttttgctgccagaaacgctaccagctctcccgctgtcatcccttctgcgctgcaggtgtgaaaacgtgcctgttcaccaaaacgcgctttaatcgcagcttccagactggcatgcgtatattgctcgccactttcaatcatcatatttaacacttcatgaccgtgaatagagtccatcgtccctcctcaaaaaaagcctagcgtagcgattgccgcttatgaagactttgcgccagcgcaggactgaatgctttttattgtacatttatatttacaccatatgtaacgtcggtttgacgaagcagccgttatgccttaacctgcgccgcagatatcactcataaagatcgtcaggacagaagaaagcgtgaaaaacagaaccctgggaagtgtttttatcgtggcgggaaccacaattggcgcaggcatgctggcaatgccgctggctgcggccggtgttggttttagcgttacgttaatcttgttgattgggctttgggcgttgatgtgctacacggcgctattactgctggaggtgtaccagcatgttccggcagataccggtctgggcacgctggcaaaacgctatctgggacgctacggtcaatggctgacgggcttcagtatgatgttcttaatgtatgctctgactgcggcatacatcagcggtgccggtgaattgttggcctccagcatcagcgactggacaggtatttctatgagcgcaaccgctggcgtgctgttgttcacttttgttgccggtggcgtggtttgtgtcggaactagtctggtcgatttatttaaccgttttctgttcagcgccaagattatttttctggtggtaatgctggtactactgctgccgcatattcacaaagtgaatcttttaaccctgccgttgcaacaggggctggctctgtctgcaatcccggtgatttttacgagctttggttttcacggtagcgtgccgagtattgtcagctatatggatggcaacattcgtaagctacgctgggtgtttataatcggtagtgcgatccccctggtggcatatattttctggcaggtggcgacgcttggcagcattgatagtacaacctttatgggattgctggctaatcatgctggattaaacgggctgttacaggcgttacgcgaaatggtggcctctccgcatgttgagctggcagtgcatttatttgctgatttagccctcgccacgagttttctcggcgttgcgttaggcttatttgattatctggctgatttatttcagcgtagtaataccgttggtggacggttgcaaactggtgcaattacgtttctgccgccgttggcgtttgcactgttttatccacgaggatttgtgatggcgctgggttacgccggtgtggcgctggcggtactggcattgattatccctagcctgttgacctggcaaagcagaaagcacaatcctcaggcgggttaccgggtcaaaggtggtcgtccggcgctggtggtggtgtttctctgtggtattgctgtgattggcgtgcaatttttgattgcggcagggttgttaccagaagtggggtgatcagatagcctcaaattccttattgggtgccagaattaacgctgacacccaatttggcctcttaatgcaggcagcactgcttaaatttcttaccactaccgcacgggcaaggatcgttacgccccggtttctcttctgctttgatcggttgctgaacagctttttcctgcggatgcgccatccagtacgcatgtagatcaagcgccgccagtcgaatggcatctacgctctcttcaaacgcttctgggctcatcttttctacccgctcgaagttttcctcagtaccgtgcagcgcaatcgcctccagcgctggttttaagctatcgggcaacgtactccagtcagaaagtgccacgccccgcatatagccaaagcaccactcctcaacaatcgtcagctcgctgccatcaacttctcgcaagccgaataacggctcaaactgctccgggaattcgttcagacgctctgcggtatcggccatatgttgaaaagccagattcataaagcgcgtcatctctttctcactcgcccagcgcggcacatagtcagccccaccccacacggcaaccagccactgttccggttcaatctcttgcggagaactcaacaccgccgtcaataaaccgtccagctccgccacatcaaggatggcgtggtcagtgttgtatttggtcagaatatcgtccagccattccaactcactttcgtttaacggtcccgttttcatacgcttttccttgtggatctcaactcgccagcacctatcttacatgccggtccgtatcagagatactttttgagtggctttgctggtgattaaaaattaaggagggtgtaacgacaagttgcaggcacaaaaaaaccacccgaaggtggtttcacgacactgcttattgctttgattttattcttatctttcccatggtacccggagcgggacttgaacccgcacagcgcgaacgccgagggattttaaatcccttgtgtctaccgattccaccatccgggctcgggaagaaagtggaggcgcgttccggagtcgaaccggactagacggatttgcaatccgctacataaccgctttgttaacgcgccaaattcttcaggcctttcagccagacatccgcttgacgccgatgtcttttaaactggagcgggaaacgagactcgaactcgcgaccccgaccttggcaaggtcgtgctctaccaactgagctattcccgcattcatcaagcaatcagttaatcacttgattttattatcgtctggcaatcagtgccgccgttcgatgcgttgcattctacttacctggcgcgatgagtcaacgatatttttcaccacttttgatcgtttgctgaaaattacgccgaaacgatcactgatcaagcaaatctgcacgcgcagcgctcaaatattgcaacatactccacagagtcagtaccgcagccacaaagaaaagtgcaataccggcgtactcaacccaaatgttcggacgccacagcagccatgccaacgccaccatctgggcagtggttttcactttcccaatccaggagacggccacgctactgcgtttacccaactccgccatccattcgcgtagcgcagaaataataatttcacgggcgatcatcgttgccgccggtaatgtcacccaccagctgtgataatgctcggttaccagcaccatggcgatagccacgagaactttatctgccacagggtcaaggaaagcaccaaaccgggtactctggttccagcggcgtgccagaaaaccatcgaaccagtcagtcaccgccgcgacgcagaaaatgagcgcggcggcaaacgggctccaggtgacaggcagataaaagaccaatacaaagaatgggataaggatgacacggaacagtgtaagcaacgtagggatattaaattgcataatgacgggtaactatctgttgtcagtaagattacccctatgttgctacagagacatcaatgtttcaagctccagaagatcttttctgccagaccttggctaatacccggcacttttgcaatttcctcgacgctggcgttacgtaaaccttgcaaaccgcccatatatttcaacaacatttgccgacgttttggcccgacgccttcaatggtttccagggaactggtatttttgaccttcgcccgttttttacggtgcccgccaatcgcgtgatcatgactttcatcgcgaatatgctggataacatgcagcgcgggactatctggcggcaaactaaatccctcaccttccggctcaaagaacagcgtttccagtccagccttacgatctgctcctttggcaacgccaagtagcagcggatgatttttatcccaactgacatccagttcggcgaagacatttttcgcctgcgcaagctggcctttgccgccgtcgataaggatcacatccgggatcttactgtcgtcaatggctttaccataacgccgacgcagcacctgattcatcgccgcataatcatcgcccggcgtgatgcctgtaatgttatagcgccgatactccgcacgcagcgggccgttagcatcaaacaccacacaggaagcgacggtttgttcgcccatggtatggctgatgtcaaagcactccatccgcttcacttccggcaatttcaacacgctggcaagcgcggtcagtcgctggtgaacggtagattgctggctaagtttgctggttaaggccgtcgccgcattggtgcgcgcgagtttcagataacgcgccctatcgccgcgaggtttggtttgaacattaatcttgcgtcccgccagttcactaagggaatcggcgagcagcgttttatcgctaagattaaaatcgagcaggatctcacccggtaaggtgcgcatctggctgccttgtaaatagaactggcctacgaaggtttctaccacctcgctcagttccgtaccgccaggcactttcgggaaatagctgcggctgccgagcactttgccctgacgaatgaacaatacgtggacacaagccatgcccgcatcgaacgccacaccaataacgtcgaggtcgtcgccggtattggaaacgaattgtttttcggtgacgcgtcgcaccgcctgaatttggtcgcgaatacgtgcagcttcttcaaactccagattctggctggcagtttccatacgactaatgagttgcgtaagcacctgatcatctttgccagacaaaaacaggcgcacatactcgacctgctgagcgtattcttcttcactcaccagtccttcaacgcacggtcccagacagcgccctatctggtattgcagacacggacggctgcgattgcgataaacactattttcgcactggcgaatggggaaaatcttttgcagtagcgccagtgtttcacgtacggcatagccattcgggaacgggccgaaatattcacctttggcatgcttcgcaccacgatgcatcgccagacgcgggtgggtatcaccactcaggaagataaaaggataacttttatcatcgcgtagcaaaacgttgtaacgcggctgatagagtttgatgtagttgtgttccagcaacagcgcttcggtttctgtgtgagtaaccgttacatcaatttgctggatctgggcgaccagcgcttcggttttgcggctagcgaggttgctacggaaatagctggaaagccgttttttcaggtctttcgctttgccgacatagataaccgtaccaccagcatcgtacatgcgataaacgcctggctggctggttacggtttttaaaaacgcttttgcgtcaaactgatcactcactgactacttaatgtctccgcattacacagaccatggcgaattgccaggtgagtcagctcaacatcgccatgaatgtttagtttactgaacatacgatagcggtagctgttcaccgttttcggactgagattgagctgttcactgatctcattgaccttctggcccttggtgatcatcagcataatctgcaattcacgttcagacaaactggcaaatgggctttctgttttttctggttcgatctggcttaacgccatttgttgagcgatgtcagaagcaatgtaacgctgcccactatagacagaacgaatcgcactcacgacttcctgcggagccgcgcctttgctgaggtagcccgcagcaccggcctgcatgactttcgctggtaaagggttttctgtatggacggtaagcatgatgattttgacatcagctgtggaacgcgcgattttacgcgtcgcctcaagaccgccaatgcccggcatactcatgtccattagcaccacgtcaacggcatttgtccggcaccacttaacggcgtcttcaccgcagcttgcctcaccgacgacttttataccctttatatcttccagaatgcgtcgtatccctgcgcgcaccagttcgtggtcatcaacaagtagaacgttgatcaaaggaatatctccagaaatagggataacgctactgatagttagtcattcgtatattagcggtttttattgcaactttgaaacgttaaaaatggtgggtattcgatttttctctcgtttttgtcaattcgattgtccacagttatggtcacgcccgtcaccaacggcttaccggatcgtttcacagtaagccctacgatgaaatgtgacaaaaattgactttattcagcaaaaatgaaaatcagcccgctgaatatgtaacattaattaacccgaacaatacgggcaaaaaacattcatgataaaaatatttattggtcattatattaacgtattttatagcactgccgatatcacgctcaaaaaacaaccactgctatttttagcaaagcttatggtatactccgccgccttaacatttttcaccgcaaattttcattgcaacatgacgaggaaaataaatgagtacgcctgatttttctactgccgagaataatcaagaactggcaaatgaagtctcctgcctgaaagcgatgctgacgctgatgctgcaggcgatgggacaagctgacgcgggccgcgtgatgttaaagatggaaaaacagcttgcgctgatcgaagacgaaacccaggctgcagtattttccaaaacggttaagcaaattaaacaagcctaccgtcagtaatataaaaccggctgatagcgtgcctttcagccggtttttgcatctggcacgcaggacagaaaagagatcaaattaagccagtagcggccgcgtaacaggcaacctgggtcttatttggtgcattaatttttttctgcatgtttttctggtggaaattgaccgtattctcagagatactcaaaatcatcgctatctctgcacttgttttcccttccgccgtccacctcagaatttctttttcgcgcttgctgaaattcatctctggcgtcatcactatttcatcatttaaacgcatcagagccatcagactttcgcgcaccagtaactgcatttttaattgcagttcatcactaagaatgggtatttcgcgcgcgctgcaacgggaaaaggacaaaaagcccagcgcccggtttggcagcattaaatactgagtgacaccgcggcgtaaaccatgtgcgcgcgcggcttcccataacggctgtgcttcgctgaataagtcatcattccacattaaatggccctgactaaagttttcagggttcagcaccggatcaattgcgagaaagttttttgcctgataataactaacccacgcctcagggtaattggtgtaaaaagccactttaggtcgagtgaatggtaccgggtggcggacacataagctatagtaatcgtactccagctgctgagcctgaagctcaatttcatggtagacctcttctgcggtctccatcctctgaaaacgcaacagcatcgtgcgacgccagctgaaaaaatccttatcctgcatagtaaaccgcaacgcccttgagagtgagtatcatttataatgataattcaaactatcacataaataagatttatatataatttatattattcaggcaatgaattacttttgcaagccatcgcattctcttatgttattaatgagttatgctgatttgttaagcagttttatcaggcttgaaatggcgtccagccccgacaggtgaatcgtcggggctgattttttcttattattgcagcagaaacttctcgaggaactggcgggtgcgaggctgctcggttccgtaacgtttatcatgttatcctaaggattatccgaaaaataatacctacgaacatcttccaggatactcctgcagcgaaatatttgttttaagctcactcacatatcgcaacatttactttactttaagacaattccaggcaaattatacaacactttacgggatagtaagtccgcctgaaaaatcgcgagagtggcgcattaggtgacccatgttgttccgtttagtcatgatgaaatattcaggtaaggggaattatcgttacgcattgagtgagggtatgccatgagtacgattattatggatttatgtagttacacccgactaggtttaaccgggtatctgttgagtagaggggttaaaaaaagagaaatcaacgacattgaaaccgttgatgaccttgccatagcttgtgatagtcagcgccctagtgtggtgtttattaatgaggactgtttcatccacgatgcttctaacagtcagcgtatcaagctcatcattaatcaacatcccaatacgttatttatcgtttttatggcaattgccaatgttcattttgatgaatatctattggtcagaaaaaatttattgatcagttctaaaagcattaaaccggaatctctcgacgatatccttggcgatattctgaaaaaagagacaacgataaccagctttttaaatatgccgacgttaagtttgagccgaaccgaaagcagtatgttgcgaatgtggatggcaggtcagggaaccattcaaatctctgaccaaatgaatatcaaagccaagaccgttagtagccataaaggtaatattaaacgtaagatcaaaacgcataataaacaggttatctaccatgtcgtccgactgacggataatgtgactaatggtatttttgtcaacatgcgctaacacattctgactggtggtttcccaccagtcaggctgaataagattactctgctttctccacaaagataccgtcctgatgccctgcttcattaaagaaccagatgccgagcgggtagtcttccaggctaaccaggtacattgtgccttcactaaactcctcaactgccagtaccacgccaggacgacgcggaccgccatccgttttgactgttacccgatcattcaccttcatcgttttcctcctgtggctttgtgccagtgtagaacaatttcgtttttctggcagcgccaggcgcgcgcgagtgctgattttctcgacggtctatacttaagagatgccaggcggacttaacgactggcggcaacaacagagtaacggttgcgaggaaagatgatgaaaaccgcaaaagagtacagcgataccgcaaaacgtgaggtcagcgtcgatgtcgatgccctgctggcggcgatcaatgaaattagcgaaagcgaagttcatcgcagccagaacgattctgaacacgttagcgtcgatggacgtgaatatcatacatggcgtgaattggcggatgccttcgaactggatattcatgacttcagcgtctctgaagtgaatcgttgaatgcacaataaaaaaatcccgaccctgagggggtcgggatgaaacttgcttaagcaagaagcacttaaaaaattcgttacaccaggaaatctgatgtgttcatcaccttatccgcaatttttttcgctgacaagaaaatattcgccatatgaatgattaacgctacttatgaatagaaatgtgacgcacgtcaccccttggtggctctggcgtcagcgggatcgctcccgaaaaaatcatctttgataatttgtgcggttttgagaatcatcctggtaagaggagtactgcgcgactatgtttagtattcaacaaccactactggtttttagcgatcttgatggcaccctgctggacagtcatagttatgactggcaaccggcagccccctggctcacccgtttacgcgaagcaaatgttcccgtcattctctgtagcagtaaaacaagtgcggaaatgctgtacttgcaaaaaacgttggggctacaaggtttaccgctgattgccgaaaatggcgcagtgatccagcttgctgagcaatggcaggagatagacggttttccacgcatcatcagtggtattagccatggcgaaatcagcctggttttaaatacgctacgcgagaaagaacattttaaattcacgacttttgatgatgtcgacgatgcaaccatcgccgaatggacgggattaagccgtagccaggcggcgctgacgcagcttcatgaggcgagcgtaacgctaatctggcgcgacagtgacgagcgtatggcacaatttaccgctcgtctgaacgaactgggcttacagtttatgcagggtgcgcgcttctggcacgtactggatgcttctgccggaaaagatcaggctgccaactggattatcgcgacctatcaacaattgagtggcaaacgcccaaccacacttggcctgggcgatgggccaaacgatgcgcccttactggaggtaatggattacgcggtgattgtgaaagggctaaatcgtgaaggggtgcatctgcatgatgaggatccggcccgcgtctggcgaacgcagcgtgaaggaccggaaggatggcgtgaagggctggaccattttttctccgcccgttaagcgttatcgctcgcgaatacccgattacgcccagcctgtttagcgagataaagccgacggtcggccagactctggagttgttcaaaatcataatcaccggtttcctcgctgctgcttacccccaggctggcactgatgcgtatcgtcgtactcttggcgatcaacatctctttttcatttaatttcagtcgaatacgttctgcgacctccgcagcctccgtcagactcgcgcctggcagaatcacacaaaactcctcaccaccgacccgcccggcaacgtcctgcgcacgcaaggaactgctaattaatccggcagcatgagaaagaacacggtcgcccgcctgatgaccaaagcggtcattaatcgctttaaaatggtcaagatcgacctgaatgacagaaaaaggatgttggtgcgtctgacacaatttagcgagcggacgggctttttcgaacagtgcgccacggttatataaacgcgttaaggtgtcgtgccacgcctgccactgcaagctgctttgcagaacatacatgttgctaaccatccggcgaatcacataccaggagatgagtaacatggtggtaaagagcgcccacagcagggttaatgcaatgctgatactgccgaaatcgccgcgcacgccttcgcttaacgtatggacacgcaccagcacaccgtcgaaatggtccagacgttcccagctaacatagcgactgtccatacgaatgccgccccgcgtgtcatgttccattgcctgcgccagcaaggccagttcacgaggatcaaaaatattccctgttggatggtcaggattggaagaggtcaaaaatctcagcttactgtcatagagctgatactcaccatcgaggtttttatcgatggcgtttcttaaaaattgctgcatagtacgcacgggaatactcatccccagcacgccataccagtagttattactgtctaccggaacactgacggtaacctgcggttcagtattgctggcgtgttccggttggctagtgaaccagcgtaccgcgcggtgacgattttctcgttgactatggccaataaaccagggttgggtgacatagccgtaataacgcgttggaacattgcgcgtaaacaaggtcggctgcgtgctaacgtaaaatccggcacggctgacatacatcgcctgttcaaccatgctgctggagttgtgcgctagtcgcagcaagtaaccaacttccagtgcagcggtaatttcattgtcgaggctttcattttcgcgagacaggagattcccctcgctgactaatgcatcgctcacaccattaactggcagagtgcgtcgtcggttgagttcgattttccaggcgtgctcgtcgcgatgctgttcgaactcggttacagcatcacgcagagaggtgaaatccagtggcgctacgagagcttcgcgcatgccattacgtaaaaagatcagtttgtcgacgttatactgcaaatgcttatcgagcgcgttggcaacgttttccagatgattacgctggctggagatataggcatcttccagcaccaccacttcacgccaggtgagcaaggtggaaaaaagcaataccacgataaagcagagattaacgacatgaccaggccccaggcggcgtgcgagttttttcaaccagctctggttttccatttttgtctcgtgctgcaccctgacgactcccaacctgcttttttatgattctggcataacctggcgatagcgtaccgcaaaacagcgataattttataatggtggcatgataagacgcgactatcattcattgcaggcattagcacaccaggccggatgtgatccggcctgatgttaatgataccctttcacacttcttccgcagaacgactcccctcccccggaacaagctcggtttcatgaaaagcttcccgcttgaccccgtaaccgtcataccaacgacactcaaccataccgctggagtatccagtgacaatcatccgcgggccgccctctttaaccgtaacttcctcactaaccataaagctcatactcgcctccttttttcgagtgaaacttgttcaccttagttgaagatggcgaattttgcataatagccagtgcgagtattaatgtgcctgaccgcgcattttctctacggctttcactcccagcaccacgatgccgccgatgataaatccaagaatcagatttaaaacagtcggtaatatcatcgccactactgcactttgctgcccggcgaaatgttcaatggcgtgatgcagcggcgcaattccatgtaccacaatcccaccgccgacgaggaacatcgccagcgtgccgacaatgcttaacgctttcatcagccagggcgcgataatcaataaccctttacctaatgcctgcatcagcgcgctggatttttccgccagccaataccccaggtcatcaatcttaacgataacccctaccagaccgtagacgcccacggtcactaccagcgcgatgccactaagcaccagcacctgattaagcaacggcgcttcggccacaatccccagcgtgatggcgacgatttccgcagacaatataaaatcggtacgaatcgccccttttattttgtccttttcaaacttcagcggatcctgcgccgccagcttctccagacgctgctggctctgcgccggatcttctttatgtttacgcgcctccagcatatgcagcactttctctactccttcaaagcagagaaacgcgccaccaatcatcaacagaggcgtaatcgcccacgggataaacgcactgatgatcagcgccagcggcaccagaatcactttattaatcaggcttcctttcgccacgccccagaccacgggaagttcccggttggcccgcacgccactaacttgttgcgcattgaggcttaagtcatcccctaatacaccggcggttttcttcgccgccagtttgcccatcacggagatatcgtccagtagtgtggcgatatcatcgagcaacgtcagtaaactactcccggccaaaagcattccctctcatttttattgttgaagggtgtaagtatgaagcaaaaacggcagctctgatacttgcttcacaggtcaacatttttttaacaatcaagtgcaattatatctctcgccagcagaatgattttcacgtttactatgaaccacctttttatttccaccgtgagggattatgcgtttccgccagttgttaccgctttttggcgcgctgtttgcgttgtatatcatttggggcagtacctattttgtcattcggattggcgtggaaagctggcctccgttaatgatggcgggcgttcgattcctggcagccggtattttattgctggcatttttgctactgcgcggacacaaactccccccgctacgtccgctgctcaatgccgcgctgattggcctgttattgctggctgtcggtaatggcatggtgacggttgccgaacatcaaaatgttccttccggcatcgccgccgtagtggttgcaaccgtgcccctctttaccctgtgcttcagccgcctgtttggcattaaaacgcgcaaactggaatgggtgggtattgccattgggcttgccggaatcatcatgctcaatagcggtggaaatttaagcggcaatccgtggggcgcgattctgattttaatcggcagcattagctgggcgtttggcagtgtttatggcagccgcattaccttacctgtagggatgatggcgggtgcgattgagatgctggcggcaggcgtggtgttaatgatcgcgagcatgattgcgggtgaaaaactgacggcgctcccttcccttagtggcttccttgcggtcggctatctggcgctgtttggtagcattatcgccatcaacgcttatatgtatttaatccgtaatgtcagtccggctctcgccaccagctacgcttacgttaacccggtggtcgcggtcttgctgggtacgggactgggtggagaaacactgagcaagattgaatggctggcgctcggcgtaattgtcttcgcggtggtactggtcacgttgggaaaatatctcttcccggcaaaacccgtagttgcgccagttattcaggacgcaagtagcgagtaatcaagcgagtaaatgaatcccctgcgtgtcgatctgcgcgctggcaccttcgccgcagatccactcttccagacgctcggtaagcgcttcatccgtcagcttctcgcgcccacgtaacgcgcactcccagacaatcaatacgcgccagccgagttcctgcaagcgactgatatcgcggcgatcgcgctcaacatttttacctatcttctccagccagaactcggttcgagtcgcaggcactttaaacagatagcagtgatgatgatgccagaagcagccatgggtaaatatcacgcagcgatattcatcaacgacaaaatccggacgtccgggcagactggcgtcctgaacgcgaaatgccaggccctgcccggttaacagactggcgaggcgcttctctatcgccgtatcacgcgtggcaatcgcgcgcatatttttgctgcgagtggccttatcgtgaacgtcggccatgttgtgcctcttgctgacgcttagttatcgactacgtcggccatgttgtgcctcttgctgacgcaacgccaccgcctgtttgatttttggctcaagcagttttgccaccgcggcaaagaccggcacgaccacgctgttaccgaactggcgataggcctgagtgtcgctaaccggaatacggaatttcgcttctcccggcgcttcaaaacccattaagcgcgcgcattcccgaggcgttaaccgacgtggacgatgttgctgattcagcggatcgtcaaagtctttctcacccgtggccatatcccagccgcgatcgattaaaatttccgcgccatctttgtaataacgcgcagacagcgtacgcgtgacgctttgcggattgttcggataaaccattccataaccgaagccgttaccgcgcgcctgatgttttttcgcatatcgatagaggtacttccacagcaccggcgtcaggatatatttcgcctcgaccatcgggtccaacagctgcgccagcgtcactcgctgcgcagggaaacattcgctgatatcacgcagggtaaaatcggctttcagattcagatcgcgacgaaaacccaccagcacgatgcgttcacggtgctgcggcagaaaatgtttgccgtcgatgattttcggatcgtctggcccattatcttctgcatcagccacgtcatagcccagttcgtccagcgtctgcatgatgatgcggaacgttttaccctggtcgtgacttttcaggtttttgacgttttcgagcacaaacatcgccggacgacgcgcgtcgataatgcgtaccacatcaaaaaacagcgtgccctgggtatcgcaggcaaaaccgtgcgcccgcccgaggctgttctttttgcttacgccagccaggctaaatggctgacaagggaaaccggccagtaaaacatcgtgttcaggaatgtgttgacgaatatgttccgccgccgcctcatcactcacgccttctttatggctgagggtgatgtcgcggatatcttcattaaaatgatgcgtcgccggatcgcaataatggttggctttataagtgcgtaccgcatgtttgttccattcgctggtaaacacgcactgtccgccaatgctttcaaaaccgcgacggatgccgccaattccggcgaatagatcgataaagcgaaacgcataatgcggatgatgtgccggtggtttgggtaataacgtttgcagatgggcgaactctttctcacttaaacggtgccatgcgctgtcattcgccagcgcacgttttaaaattgccgcgctccagtgattctcacctacaccattaagctgcgccaccaacgttttaacatcataaatttgcagcagtttctccagcattgcctgtgcggcattcccggtgctgtaactatcggttacacttatattttcctgcatagatttcaccggccatctgagatggccgacaggttaacataattacagccatttagggccacgcgctcagccagcggaactaaacgcatctatcaccttgtgatcgacaccttcattctcccccgccagttcggcactgagcttcgccataaactcgactaaaaaatgcgcgttgtgctgcgccagctgcttgcctcttgcggtttgcatggtttgcggtagcttcagcaacttagtctggaaatgatccagcgcgtagcgtttatcatcaagcgggcgatgctgtgcgaacggatcttcaccatcaaacagcgccacgcccaatgccccactaacggcaaacacgcgcgccaggccaatcgcccccagggcttccagccgatccgcatcctggacaattttagcttccgttgttaagggggcgatttgcgcgctgaaactgtgagcggcaatggcatgacaaacggcctcgattttctccgccggaaattgctcgaactcttcacggagcaggcgacgcgtctcttctgccgccaggatactagaacgctgcctttgcggatgatttttcgccaggctcacaatatcgtgaaaataacaggcggttaaaatcaccagcatatcgacatcgtcatctgccgccagcttctgtgccgtagcccagacgcggcgaaaatgacacacgtcatgggccgcgtcctggtgctgatgatggtttttcaaccagttttcgaactgtgcctgccagtgttgtaagtccatacgcgctccgttgccaaagagtcgccaccttagcagtttttattcatagcgtctgctacgtgcgggacgaggtcgggtgtaccaggcaatgctgcctaacaatgccccgaccagagccataaataaaaatccgaccagtgcccctaaccactttcccgcggtagagcctaaatcgctttcaaatccgctcacgggggcatcgggaatccggctcatcacccagatgtaacgcgccattgcccagacgaaatagccacaccatgtatagaaagcccacaaagccagtttgccgccagggctgcgagagagtctctcttccatctttgtgctaccgtattccattttgagataacccggaaaattcagacttagtactattatgtgataaaagtcacatttttccacattggatgagccagtcaagactcaatcattttttgaacaaatagataaattttgcgcaacggcagtgaatacaggaaaaatcgttttgagcgattttatttatctttgatatcggctttattaattcatttaatcaatatattagcactgattacaattatacctttttattattctgtgtcatgatgcttccgttattagccttttatcgtcttgtttatattttttgggccggcatgatgccggcttttttttatgccttcattaatgtgcgcctgatcacaccagccgtttggcgcaacaatcattgataccccctatgtttccgctcaactcataacatattgatatacatttataattttcatgaatatttatatttagaattcataattatgaattatattaaatagattagaaacattttgatatcttttaaatacatttgttacatgtaatccttaaaataaaatgaacttcatagaatagtatccaaatgtgcttttttttggataacggcacttattgatatattcatgaagattataatcacaagggaatacataatgaaaagaaaagttctggcaatgctggtcccggcgttattagttgctggcgcagcaaatgcggctgaagtctataataaagatggtaataaactggatttgtacggaaaagtagtgggtctgcactacttctctgatgattctggcagcgatggcgacatgtcatatgcccgtatcggtttcaaaggtgaaactcagatcgctgatcaattcactggttatggtcagtgggaatttaacattggcgcaaacggtcctgaaagcgacaagggtaataccgcaacgcgtctggcatttgcaggtttaggctttggtcagaatggtactttcgactatggtcgtaactacggtgtcgtatatgacgtagaagcatggaccgatatgctgccagaatttggtggcgatacctatgctggcgctgacaacttcatgaacggtcgtgctaatggtgttgcaacctaccgtaacaatggcttctttggttaggtcgatggcttgaactttgctttgcaatatcagggtaataatgaaagtggtggaccattcgggcaggaaggttccggtagtggtgatggccgtagcctttccaaagaaaatggtgatggtttcggtatgtcaacatcctacgacttcgacttcggtttaagtctgggtgctgcatatcaaactctgatcgttcagatcgtcaggttggagttggtttaaatgatcgtaaccatagcaacagaaatgctggtggtgaaaccgctgaagcatggactgttggtgcaaaatatgatgctaataatgtgtatttagcagctatgtacgctgaaactcgcaatatgaccccatatggtggtggcgagtttgataatggtgaatcaagatcagccatcgctaacaaaacccaaaactttgaagttgttgctcagtatcagttcgactttggcctgcgcccgtccatcgcttacctgcaatctaaaggtaaggatttaggcggttgggctcatgacggcaacggcgacccacgttacaccaataaagatctggttaaatacgttgatattggtgcgacctactacttcaacaaaaacatgtccacctatgttgattacaaaatcaacctgctggacaacgacgatgacttctacgaagcaaacggcatcgctaccgatgatatcgttgctgtgggcttagtctaccagttctaatcagtcaactcgctgcggcgtgttactgtaaaactgaacactagcctgagttcgtccctcatcgaactcaggcttttttattggcatttcatctccatctgcggcacacgcaattgccgaagcatatcgatacagcaccttaccctgcccctcctggcacaataacatcaaccagctactcttcaagctaacacccaaatgcatttctttatgaattaatccgtaacaaacacgcttcccatatagaaatatttgcaaaaatagtgcatgaaataagctttttctctaccaatccgggatataaatattcatcagcaccacaatattccacagcactaaatctctccccgccaccccgtacctctgataatggtctaaaatcattgaagccacttgcgacgacgttgctcaataaggaaaatttggcgtgaataatattcaacaccagtgcagcatcatcattacatacttacagccgccgactaccgctttcgatatattgactcaattttccagcctggttaaaaatagcgaccagctcagtcgcaaatatagtgactaccctaactaagcaacaataaggaatacactatgactgttcaaacaagtaaaaatccgcaggtcgatattgctgaagataatgcattcttccctagtgaatatagccttagccaatataccagtcctgtctctgatcttgatggcgtggactatccaaaaccttatcgcggtaaacataaaattctggtgatcgccgcggacgaacgttatttgccgaccgataacggaaaactgttcagcaccggtaaccatccgattgaaacgttgctgccgttgtatcatctccatgctgcaggtttcgaattcgaagtggcgaccatttccggtctgatgaccaagtttgaatactgggctatgccgcacaaagatgaaaaagtaatgccattctttgagcagcataaaagcttgttccgcaatccgaagaaactcgcggatgttgttgccagcctcaacgctgatagcgaatatgcagcaatctttgttcctggtggtcatggcgcacttattggtttacctgaaagccaggacgtggctgccgctttacagtgggcaatcaaaaatgaccgttttgttatctccctttgccacggcccggcggcttttctggcgcttcgccacggcgataacccactgaatggttattccatttgcgcattcccagacgccgcagacaaacaaacgccagagattggctatatgccgggtcatctcacctggtacttcggcgaagaactgaagaaaatgggcatgaatatcattaatgacgacatcaccgggcgagtacataaggaccgtaaacttctcaccggcgacagtccttttgcagcgaatgcgttgggtaaactggcggcgcaggaaatgctggcagcttacgcgggttaatccctgttacgtttgaatgtaagcgcataatcaatcgcggccgcgttagtactcacgacgtggctgcgttttttcacggttaatttatggcgtactgaagccctatgttaatttctttgcggtaacgtaatccggaacacattatgcttattgagatagtgatacgtagcacttcccccatgcaattcggcaatcgctttgactaaagaaaggcctagtccctgacctacggaatgacggctattatctccccgccaaaatctacggaagagtttttcaggctcattaattttcgttccagggctggcgatatcaatattaagatagctgttggtatcaagaaaactggttatatgaatacggcttttttctgggctatatctaatggcattaacaataagattgcttaacattcgttgtagtaaaattttatccgcaaagatttgctgattgcactcgaccttaaagcaaatctctttctcgtcactaaggtattcaagatagtccaacaaattttcgacttccttattgagagaaaggctgtccagtttcaccaaaacattgtttttatctgccctggcaagaaacagtatgttctctgttaaccggctaatattttccagctcttcaatgtttccggcaattgttttttgatattcagcgatacttctggtttgactgagcgtaacctgattctgacccagtaatgcattaattggcgttctaagttcatgagcgagatcgtcagcaaactgacttagacgctcaaaatctttgactaaagcatgatgcattttattcaacgcctgcccaagaggttttagttctctcggtaatgcgctaacctcaacaggctctcggctatcgttataattcagcgcttccgttacaccactcaactttttgatctctcgtaatcccgttctgattaacagcggacttaatacactgcaaagtacaatggcgacaatgcaaattataatgctattaattttatactgttcaagcatgttatgtctggcactagccaatttagccacagtaaccgttaaacttgggctaacttcatcaatattaattcgtaaagcatctatctctgtatcattaataatgcttctgtaaatgccagctgcgctgattgtctcactagcaggtatgttatttaacatgccatcactgacatttgtccggttaacaattttattgatgctatcaccatgaataatcaagatatcctgactaacatccatcatccggttaaagtacacaggtaacgtatctggatttaccccatcaattaacaactgcttgatctgcgctgtccggttaatgagtgttgtatcatcgcgccatttcaactcacttgccaggccattatagagagtccagacaattccggcgccagcaacagacagtagcaatataaaaagcaaggttaaacggacggttatagatagtcttttcattatttttttaccgctacgaaactatagcccatcccccggattgtggcaattagcttttcaggaaaaggatcatcaacttttgcgcggagcctgcgaatggcgacgtccaccgtattggtatcactatcaaagttgattccccaaatttcactcgcaataaccgttctgggtataatttcgccagctctggaggccagtagccaaagtaactgaaactccttgcgcgtcagtgtaatactgatattgtccctgctcacactatgactaacagagtccattcttaagccgctgatttctaatgtactattcaaagcgtgatgttgccttaattgtgcccgaacccttgccagcaactcagaaaaactaaaaggttttaccagataatcatttgccccactgtccagccctctgactctgtcatcgacagaatcccttgcagtaaggcaaataacaggggtttgctttgctgttcttaacgtttgtaagatctgccagccatccatacccggaagcataatatccagaatgatcaatgcataatcatccttcagcgcaagataaagcccatctctgccatcagaaacggcatcgatgacataacccgcttcggaaagcccctgcgttacccattcctgggtcctttgattatcttcaataagtagaatcttcatgaaaataatatgccataaatcatatgttatagaaacagcctggttcattacaaaattgtaatgctgctgtaaggttaccctggacgctttttcgctatcctcaaaactcattcacatgacaaggatataaacatgttaaagcgttatttagtactcagcgtagcaacggcagcatttagtttaccttctttggttaatgccgcacaacaaaacattcttagcgtgcacattttgaaccagcaaacaggaaaacccgctgctgacgtgacagtcactcttgaaaagaaggcggataacggctggttacaacttaataccgccaaaacagataaggatggacgaattaaggcactgtggcccgagcaaactgcaactacgggcgattaccgtgtcgtatttaaaaccggggactatttcaagaaacaaaatcttgaaagtttcttccctgagatccccgttgaatttcatattaataaagtgaacgagcattatcatgtgcctttattacttagccaatatgggtatagtacctatcgtggcagttaatgcataaatatgtaaaagcagatctctgctactgttagggaggacactccctgacagattaacagtaaacggctcttgctggctaacgacaaaaaagtgtgatggcttatgaaaaagaatcaatttttaaaagaaagtgatgttacggccgagagcgtattctttatgaagcgtcggcaggtgttaaaagcactgggcatcagtgcaactgcactttctttgcctcacgctgcgcatgccgatctgcttagctggtttaaagggaacgatcgcccgcccgcccccgccggaaaagcgctggagttcagcaagcctgccgcctggcaaaataacctgccactgacgccagcagataaagtttccggttataataacttctatgaattcgggctggataaagccgatcccgccgctaatgctggtagcctgaaaaccgatccatggacactgaaaatcagcggcgaagtggcaaaaccattgaccctcgatcatgatgacttaacccgtcgcttcccgctggaagagcgtatttatcgtatgcgctgcgtggaagcgtggagcatggtggtgccgtggattggttttccgctgcacaaattgctggcgcttgccgaacctaccagcaatgcgaagtatgtcgctttcgaaacaatttatgcaccggaacagatgccaggccagcaggaccgctttatcggcggtgggctgaaatatccttatgtcgaaggattgcgtctcgacgaagcaatgcatccgctcacactgatgaccgtaggtgtttatggcaaggcgttaccgccacaaaatggcgcgccggtgcgactgattgtgccgtggaaatatggctttaaagggattaaaagcatagtcagtattaagctgacccgcgagcgtccgccaaccacctggaatctggcagcgcctgacgaatacggtttttacgccaacgttaatccgtatgttgatcacccgcgctggagtcaggctaccgaacgatttattggtagtggcggcatcctcgatgtacagcgccagccaacgctactgtttaatggttacgccgcccaggtggcaagcctgtatcgtggcctggatttgcgggagaatttctaaatgcgtctgacagcaaaacaggtgacatggctgaaagtttgcctgcatcttgccggattgttgccgtttctctggctggtctgggcgatcaatcacggtggactgggtgccgatccggtgaaagatattcagcattttactggtcgcactgcactgaaatttttgctggcgaccttgttaatcacccctctggcacgctacgcaaaacagccgttattgatacgcactcgccgcctgttaggattatggtgctttgcctgggcgacactgcatttaacaagttacgcattgctggagctgggcgtgaataatctggcgttattaggtaaggagttaattacccggccttatttaacgttaggtattatcagctgggtaattttgcttgctttagcgttcactagtacccaggcgatgcagcgaaaactcggcaagcactggcaacagttgcataatttcgtctatcttgtcgcgattctggccccaatacattatctgtggtccgtgaagattattagtccgcagccgctcatctacgctgggctggctgtactgcttttagccttacggtataagaagttgcgttccctttttaaccggttacgcaagcaggttcacaacaaattatctgtataacttcatattgccgacaaagtacgcgttatccctgccggatgtggcgcgagcgccctatccggcatacacagatcgcatcaggttatgtttcgtttgtcatcaacctcaaatcaccaaaataatttattttatttcaataagatagataagtagaactgagaaagccatgctctcgtttcctaagagttgttgcattttgctatatgttacaatataacattacacatcatatacattaactctggaggaaactgttttggcgattcgtctttacaaactggctgttgctttaggtgtctttattgttagcgctcctgcctttagccatggtcatcacagtcacggcaaacccttaacagaggtcgaacaaaaagctgctaatggtgtttttgatgatgccaatgtacaaaaccgaacgctcagtgactgggatggagtctggcaatccgtttatcctttactgcaaagtggcaaacttgaccccgtctttcagaagaaagcggatgcagataaaactaaaacatttgctgaaattaaagattattatcacaaaggttatgcaacagatatcgagatgattggcattgaggacggcattgttgaattccatagaaataatgaaacaacaagctgtaaatatgattacgatggatacaaaatactcacctataaaagtggcaagaaaggcgttcgttacttattcgaatgtaaagatcctgaaagcaaagcccctaaatatatacaatttagcgatcatataattgcaccacgaaaaagttctcattttcacatttttatgggtaatgatagtcagcaatctttattaaatgaaatggaaaactggccaacgtattatccatatcagttgagtagcgaagaagtggtcgaggaaatgatgtctcattgagtattctcatgataacgcctcgatgccgctttagtaagttatcataactgccactggtccatccacaaacgccactgaacgcaagctagctacagacacgctcatcactatgacgtgtctgtatattaataagctaacccgcattgagttaaccaataacggattccatacacaatacggccaacagagaaagatacctgtgctcacgccattgcttatattggctggttacaatatgcactatcaattttttaaataacaaattattaaaaccacatctgtataaggaatttttaaggttcgtgggatagcttgactgtgaaaatcacaggagctacaaaaatgaaccgattcagtaaaactcaaatttatttacattggataacgctgcttttcgttgcaataacctatgccgcgatggaactccgtggctggtttcctaaaggtagtagtacttatctgctgatgcgagaaacacattacaatgcgggtatattcgtttgggtgttaatgtttagtcgcctgattataaaacaccgttatagtgatccttctattgtgccaccgccacctgcctggcaaatgaaagcggctagcctaatgcacatcatgctttatataaccttccttgcacttcctctgctggggattgctttgatggcttacagtggaaaaagctggagtttccttggtttcaatgtgtctccctttgttaccccaaacagcgaaattaaagcactgataaaaaatattcacgaaacctgggcaaatataggctactttttaatcgcagctcacgctggcgcagcactctttcatcactacattcagaaagataatactctgttacgaatgatgcctcgccgcaaataagtcgatccccttacaaggaaatgtgaaccatggacatcaacgcgtcataaatgtttacgcaagtgcacaatgcaccctttccactatcaacaaggaggagcagaaactgtgtaaatcgtacaatggtaagacttatcaaaaatacaggttaattttggtatttaaaccttttttacttgttagtatgatacaaaggctttcaaaaaagctgcgaaattcaacaactcttggaaattatggactttgtcccgcggctttaatctgacggccgcgttccttttttgactcaattattgaacccttctctacgcaacttcagttcccaccaccaactttgcggcagtttcataggatgaatgtctaaaagaataatggtgagcgataagaaaacgactgaataactgcacattttcgctcgaaagcttcctgtcagatccatagcgaatcaagtgctgaatgtcacagtatcgaacagaaaacagtgacgatctaacccttcaagaatattctacgattgttctgtttaggaaaagcaaggcgggaagtcgggagataagtcattgataaaggttcagatggttgccatgatgccaggaaatttggcattttaacagtccctgtccgtgcaattttgttcaagtgacgagtttgcgagcaaaacgatgattaagtggccctggaaagtacaagaaagtgcacatcaaactgcccttccctggcaggaagcactaagcatcccccttttaacgtgtctgacggaacaggaacaaagcaaattagtcactcttgccgaacgttttttacagcaaaagcggcttgttcctttacagggctttgaactggatagtttaagaagctgccggatagcacttctattttgcctacccgttctggagttaggactggaatggctggatggttttcatgaagtcttaatttatcctgcgccatttgtggtcgatgatgaatgggaagacgatatcggtctggtgcataaccaacgtattgttcagagtggtcagagctggcagcaagggcctatcgttttgaactggttggatatacaagattcttttgatgcttctggttttaacctgattattcatgaagtcgctcataagctggacacccgtaacggcgatcgcgccagcggagttccctttattccgttgcgtgaggttgctggctgggaacacgatcttcatgctgcaatgaacaacattcaggaagaaatcgaattggttggcgagaatgcggcgagcattgatgcttatgcagccagcgatcctgctgaatgttttgccgtactttctgaatatttctttagcgccccagaactttttgctcctcgtttccctagtttgtggcaacgtttctgccaattttatcaacaagatcctttgcagagactgcatcacgctaatgatacagacagctttagcgcgacgaatgttcattaattaacaactttgcagattaattaaccaattgaaatgacttatgaaatttagtgttgacagacaaggtaccgctaagtaatattcgccccgttcacacgattcctctgtagttcagtcggtagaacggcggactgttaatccgtatgtcactggttcgagtccagtcagaggagccaaattctaaaaattcgcttttttagcgcaatgtcactgaccttagttgaacattgttttttaacggatagcgggtttttaacatcttaagcgccctcgacctttatggttgagggcgttttgctatgaacgccatcaccattttcccctcgattataaaacttgagttattcagtagtctcccctcttgcaactcacacccaaaactgcctaacgaaaagttattaattttcaatcatattgctatcagtatttacattttttcgctgtgctagaaagggcgcatttatgttagctcgtagtgggaaggtaagcatggctacgaagaagagaagtggagaagaaataaatgaccgacaaatattatgcgggatgggaattaaactacgccgcttaactgcgggtatctgtctgataactcaacttgcgttccctatggctgcggcagcacaaggtgtggtaaacgccgcaacccaacaaccagttcctgcacaaattgccattgcaaatgccaatacggtgccctacacccttggagcgttggaaagcgcccaaagcgttgccgaacgtttcggtattagcgtggctgagttacgcaaactcaaccagtttcgtacgtttgctcgaggttttgataatgtccgccagggtgatgaactggatgtcccggcacaagttagtgaaaaaaaattaaccccgccgccgggtaatagcagtgacaacctcgagcaacagatagccagtactagtcagcaaatcgggtctctgctcgccgaagatatgaacagcgagcaagcggcaaatatggcgcgtggatgggcctcttctcaggctagtggcgcaatgacagactggttaagccgcttcggtaccgcaagaatcacgctgggcgtggatgaagattttagcctgaagaactcccagttcgattttctccatccgtggtatgaaacgcctgataatctctttttcagtcagcatactctccatcgtactgacgagcgtacgcagattaacaacggcttaggttggcgtcatttcactcccacatggatgagcggcatcaacttctttttcgaccacgatcttagccgttaccactcccgcgccggcattggcgcggagtactggcgcgactatctaaaattaagcagtaacggctatttgcgactgaccaactggcgcagcgcacctgaactggacaacgattatgaagcacgcccggccaatggctgggatgtacgcgcagaaagctggctacccgcctggccgcaccttggcggtaaactggtctatgaacagtattatggcgatgaagtggccctgttcgataaagacgatcggcaaagtaatcctcatgccataaccgctggacttaactatacccccttcccgctgatgaccttcagcgcggagcaacgccagggtaaacagggcgaaaatgacacccgttttgccgtcgattttacctggcaacctggcagcgcaatgcagaaacagcttgacccgaatgaagtcgctgcacggcgtagccttgcaggcagccgttatgatctggtggatcgcaacaacaatatcgttctggaatatcgcaaaaaagaactggttcgcctgaccctgacagaccccgtgacagggaagagtggagaagtgaaaagtctggttagcagcctacaaaccaaatatgccctgaaaggctataacgtcgaagccaccgcactggaagctgccggtggcaaagtggtcacaacgggtaaagatattctggttaccctgccggcttaccggttcaccagtacgccagaaaccgataacacctggccgattgaagtcaccgccgaagatgtcaaaggcaatttgagcaatcgtgaacagagcatggtggtcgttcaggcacctacgctaagccagaaagattccagcgtaagcttaagtacccaaacattgaacgcggattcccatagtaccgccacactgacttttattgcgcatgatgcagcaggtaatcctgttgtcgggctggtgctcagcacgcgtcacgaaggtgttcaggacatcaccctttctgactggaaagataatggtgacggaagctatacccagatcctgaccacaggagcgatgtctggcacgctgacgctgatgccacagctgaatggtgtggatgcggctaaagcccccgccgtggtgaatatcatttctgttagcagttcccgaactcacagcagtattaagattgataaggaccgttatctctccggcaatcctatcgaggtgacggtagaactgagagatgaaaatgacaaacctgttaaggaacaaaaacagcaactgaataacgcagtcagcatcgacaacgtgaaaccaggagtcactacagactggaaagaaaccgcagatggcgtctataaggcgacctataccgcctataccaaaggcagtggacttactgcgaagctattaatgcaaaactggaatgaagatttgcataccgctggatttatcatcgacgccaacccgcagagtgcgaaaattgcgacattatctgccagcaataatggtgtgctcgccaatgagaatgcagcaaacaccgtcagcgtcaatgtcgctgatgaaggaagcaacccaatcaatgatcataccgtcacgtttgcggtattaagcggaagcgcaacttccttcaacaatcaaaacaccgcaaaaacggatgttaatggtctggcgacttttgatctgaaaagtagtaagcaggaagacaacacggttgaagtcacccttgaaaatggcgtgaaacaaacgttaatcgtcagttttgtcggcgacagcagtactgcgcaggttgatctgcagaagagcaaaaatgaagtggttgctgacggcaatgacagcgtcacaatgaccgcgaccgtccgggatgcaaaaggcaacctgctcaatgacgtcatggtcactttcaatgttaatagtgcagaggcgaaactgagccaaaccgaagtgaatagccacgacgggatcgccacagctacgctgaccagtttgaaaaatggtgattatagggttacggcctctgtgagctctggttcccaggctaatcaacaggtgaattttatcggtgatcaaagtactgctgccctgaccctcagtgtgcctagtggtgatatcaccgtcaccaacacagctccgcaatatatgactgcaaccttgcaggataaaaatggcaacccactaaaagataaagaaatcaccttctctgtgccaaacgacgtcgcaagtaagttcagcattagcaacggaggaaaaggcatgacggatagtaacggggttgcaatcgcctccctgaccggcacgttagcgggcacgcatatgatcatggctcgtctggctaacagcaatgtcagcgatgcacagccaatgacgtttgtggcggataaagacagagcggttgtcgttttgcaaacaagcaaagcggaaatcattgggaatggcgtggatgagacaactctgacagcaacagtgaaagatccgagcaatcatccggtggcggggataacggtaaacttcaccatgccacaggacgttgcggcaaactttacccttgaaaataacggtattgccatcactcaggccaatggggaagcgcatgtcacgctgaaaggtaaaaaagcgggcacgcatacggttaccgcaacgctgggtaataacaataccagtgatagccagccggtaacatttgtggcggacaaagccagcgctcaggttgtcctgcagataagtaaagatgagatcacaggtaatggcgtcgatagcgcaacgctaactgcaacggttaaagatcagttcgacaatgaggtgaataatcttccggtaacattcagcagtgcctctagtggactcaccctgaccccgggagtaagtaataccaacgagtctggcatcgcgcaggccactctcgcaggcgttgcctttggtgagaagacggttactgcaagtctggctaataatggtgccagcgacaacaaaactgtgcattttattggcgacacagcggcggcaaaaattatcgagttggcgcctgtcccagacagcataatcgccggtaccccgcagaacagctccggcagcgtcatcaccgccacagtcgttgataataatggctttccggtgaaaggtgtgactgtgaacttcaccagcaacgcagcgacagccgaaatgacgaacggcggtcaagccgtgacgaacgaacagggtaaggctaccgtcacttataccaatacccgctccagcatagaaagtggagcgagaccggataccgttgaggccagtctggaaaatggtagctccacgcttagcacaagtattaatgtcaacgctgatgcgtctacggcacatctcaccttgctacaggcactttttgatacagtctccgcaggcgagacaaccagtctgtatattgaggtgaaggataattacggcaacggtgtcccccagcaggaggtaaccctcagcgttagtccaagtgaaggcgtgacccccagtaataacgctatatatactaccaaccacgacggcaatttttacgcaagctttaccgctacaaaagccggggtttatcaattgacggcaaccctcgaaaatggcgatagcatgcaacaaacagtgacctatgtgccgaacgtcgcgaatgctgaaatcacgctggcagccagcaaggatccggtgattgccgacaataacgatctcacgacactaacagcaacagtcgctgatacagagggcaatgcgatagccaacactgaggtaacatttactctgccggaagatgtgaaggcgaacttcacgctgagcgatggcggtaaagtgattactgatgctgaaggcaaagcgaaagtcacgctgaaaggtacaaaagcaggcgctcatactgttacagcaagcatgactggcggtaagagtgagcagttggtggtgaactttattgcggatacgctcactgcgcaggttaatcttaacgttaccgaggacaattttatcgctaataacgtcgggatgaccaggctgcaggcaacagtgactgatggaaacggcaacccgttagccaatgaggcggtgacattcacgctaccggcagatgtgagcgcaagctttactctcggacaaggcggttccgccattactgatatcaacggcaaggctgaagttacactgagcggtacaaaatccggcacctaccccgtgacagttagcgtgaacaattatggtgtcagtgatacgaaacaggtgactttgattgccgatgctggtaccgcaaaactagcctccttaacctctgtatacagtttcgtcgtcagcacgaccgagggcgcaaccatgacggcaagcgtcactgacgctaacggcaacccggtagaaggcataaaagttaatttccgcggaacctccgtcacgctaagcagcaccagcgttgaaacggatgatcggggtttcgctgaaattcttgtgacaagcaccgaggtcggactgaaaacagttagtgcctctctggcagataaacctactgaagtcatcagccgattactgaatgccagtgcagatgttaattctgcgacgattaccagtctggagataccggaaggtcaggtaatggtcgcacaagacgtagcagttaaagctcacgttaacgaccagtttggcaacccggttgcgcatcaacccgtgacattcagtgcagagccatccagccaaatgatcatcagccagaatacggtctctactaatacgcagggtgtagccgaggtcaccatgacgcccgaaagaaacggtagctatatggtgaaagcatccctgccgaatggagccagtcttgagaaacaactggaggctattgatgaaaaactgacactcacggcgtccagtccgcttatcggtgtctatgcccctacaggcgctactctgacggcaacgctaacctctgcaaatggcactccagtggagggtcaggtcatcaactttagcgtaacgccagaaggggcgacgttaagtggcggaaaagtgagaactaactctagtggtcaggctccagtcgttttgaccagcaataaagtcggtacatatacggtgactgcatctttccataacggcgtaacaatacagacacagacaaccgtgaaagtcactggcaacagtagcaccgcccatgttgctagctttatcgctgatccaagcactatcgccgccaccaacactgatttaagtaccttaaaggcaacggttgaggatggcagtggtaacctgatcgaaggtctcactgtgtacttcgccttaaaaagcggctctgccacattaacgagtttaacagcggtgaccgatcaaaacggaatcgcgacaacaagcgtgaaaggagcgatgacaggtagcgtcacggtaagcgcagtcacgaccgctggtggaatgcaaacagtagatataacgctggtggctggcccggcagacaccagccagtccgtccttaagagcaatcggagtagtctgaaaggggactataccgatagtgctgaattacgtcttgttctgcacgatataagtggcaatccgatcaaagtttctgaagggatggaatttgtgcaaagtggtactaacgtgccctatataaaaattagcgcaattgattacagtctaaatatcaacggtgattacaaagccactgttacaggaggcggagagggtatcgcaacgctgatccctgtattgaatggtgttcatcaagctggtctgagtaccacaatacaattcactcgcgcagaagacaaaataatgagcggtacagtaagtgtcaatggtactgacctaccgacaactacattccctagccaggggttcaccggggcgtattatcagttgaataatgacaactttgccccaggaaaaacggcggctgattatgagtttagtagctctgcctcctgggtcgatgttgatgctaccggtaaagtgacatttaaaaatgtcggcagcaatagcgaaaggattacggcgacgccaaaaagtggaggccctagctatgtatacgaaatccgtgtgaagagttggtgggtgaacgccggcgaggctttcatgatatacagccttgctgaaaatttttgcagcagcaatggctacacgctccccagagcaaactatttaaaccactgtagttcccgaggcatcgggagtctgtacagtgaatggggagatatggggcattacacgactgacgctggttttcaaagtaatatgtattggagttctagtcccgcaaacagtagcgaacaatacgtagtttccctggcaacaggtgatcaaagcgtatttgaaaagcttgggtttgcttatgcgacatgttataaaaacctgtgattttccgttataatttcttaaagagtgttccattcggggcactcttttttacattccctctacagaactagcccttctctcacagaaaatgaataaataaaaatgcggcaccgccagaatcgcgttcgatgtgactatgatcattttcggtgagtactgctttgatctaaaggctggttttctgtgatgattgaccagcctcagagtattgatgacaccaccgttcataacagatcggcattactatgcataagtactgtctcatattctcgccaaaacactttttaatgcctttgcgaattcatccagacttatattgtcaattttttgcccaacgacgactgactccgagacatcggccattgcgggccatcgcgttttgtaatcagcataaattgcaacaacaggggtattataggcacttgccatatgtaatattgaggtgtcaggagttattgcgatataagcatcttttatgattgctgctgaacgtttaatcgagggtggtaaggataaacggtagacattattataacaatccactaatgccctggctttatcttcacctttgggtccatgaacgatcactattggtatatctgtttcactttaaatttttgctattagattttctgcaatcgataatgaaaatgtacgttcctgcgagctaccttctaaattgaacgcaatgtaagatcctaacgatcgcatttcctcgcgcacctcatcgagtacatcctcacttagtggcaattcatatattggcctgactgctggaaaacccgcctcacgcatcataaatgcccatgtcataggtacgggagcccggagtttctgatccatactggacgcgttcttgcacaaaggggagaagcaattcatggttataccaacaacctgaaaattcgtttttgctttcaactgactgataaataacatcgttttcaggttctttttacgcatcccctcaatgcaaagatccggcgtaccgtattgctgtgttatgttctttgctaaatcttttatttcttttaatgttgcgtgatcctgcatagtcattgtgactaatgttaatttagtctgttcaagtttaagcgcattaaagacttctaaattaattgtcgacgttacaattaaaagatgcttaattttatgcaattcaagcgcccgaataacaggaaagatggccatagcatcgccaatctgatcgggaatatggatgacaacaaagtctgttttttcaatattgaaattataagctttataatcgtagtaactaaatgcaatacgtctcaacaatgatgctaaaaacatacctaacctcgcctccctactggttataatgcaatgcagtctatcagactcatcagggtgccattttgtgcatatgcggacttttatgtttcatatctctaacctgtgggtcctctgcttaatccttaaacaacaccagcaactcctgcgctttcatcttccatcgaatttttcatgttgccgctaatcagccataaaatcatttgcagatgcgctctgtcgaggtagtctcataaggttcgtttatagatcgacggcaatgtgagttaccttttccatactaattataaaaagacagtacaaacaggatcattatggactccacgctcatctccactcgtcccgatgaagggacgcttagcttaagtcgcgcccgacgagctgcgttaggcagcttcgctggtgccgtcgtcgactggtatgattttttactctatggcatcaccgccgcactggtgtttaatcgcgagtttttcccgcaagtaagcccggcgatgggaacgctcgccgcatttgctacctttggcgtcggatttcttttccgtccgctcggcggtgtcattttcggtcactttggcgaccgactgggacgtaagcgcatgttaatgctgaccgtctggatgatgggcatcgcgacagccttgattggtattcttcctagtttcagcaccattgggtggtgggcacctattttgctggtgacactgcgtgccattcagggatttgcagtcggcggcgaatggggaggcgcggcgttgctttccgttgaaagtgcaccgaaaaataaaaaagccttttacagtagcggtgtacaagttggctacggtgtaggtttactgcttagtaccggactggttagtttgatcagtatgatgacgactgacgaacagtttttaagctggggctggcgcattcctttcctgtttagcatcgtactggtactgggagcattgtgggtgcgcaatggcatggaggagtccgcggaatttgaacaacagcaacattatcaagctgccgcgaaaaaacgcatcccggttatcgaagcgctgttacgacatcccggtgctttcctgaagattattgcgctacgactgtgcgaattgctgacgatgtacatcgttactgcctttgcacttaattatagtacccagaatatggggctaccgcgcgaacttttccttaatattggtttgctggtaggtggattaagctgcctgacaattccctgttttgcctggcttgccgatcgttttggtcgccgtagggtttatatcacaggtacgttaatcggaacgttgagcgcatttcctttctttatggcgcttgaagcacaatctattttctggatagttttcttctccataatgctggcaaacattgcgcatgacatggtggtgtgtgtgcaacaaccgatgtttaccgaaatgtttggtgccagttatcgctatagtggcgctggagtcggttatcaggttgccagtgtggttggcggtggatttacaccttttattgccgctgcactcatcacttactttgccgggaactggcatagcgtcgccatttatttgctggctggatgcctgatttccgcaatgaccgctttgttgatgaaagacagtcaacgcgcttgatagcctggcgaagatcatccgatcttcgccttacacttttgtttcacatttctgtgacatactatcggatgtgcggtaattgtatggaacaggagacacacatgaataataagggctccggtctgaccccagctcaggcactggataaactcgacgcgctgtatgagcaatctgtagtcgcattacgcaacgccattggcaactatattacaagtggcgaattacctgatgaaaacgcccgcaaacaaggtctttttgtctatccaagtctgaccgtaacctgggacggtagcacaaccaatccccccaaaacgcgcgcatttggtcgctttacccacgcaggcagctacaccaccacgattactcgccctactctctttcgtagctatcttaatgaacaacttacgttgctgtatcaggattatggtgcgcatatcagtgtgcaacccagccagcatgaaatcccttatccttatgtcatcgatggctctgaattgacacttgatcgcagtatgagcgctgggttaactcgctacttcccgacaacagaactggcgcaaattggcgatgaaactgcagacggcatttatcatccaactgaattctccccgctaagccattttgatgcgcgccgcgtcgatttttccctcgcacggttgcgccattataccggtacgccagttgaacattttcagccgttcgtcttgtttaccaactacacacgttatgtggatgaattcgttcgttggggatgcagccagatcctcgatcctgatagtccctacattgccctttcttgtgctggcgggaactggatcaccgccgaaaccgaagcgccagaagaagccatttccgaccttgcatggaaaaaacatcagatgccagcatggcatttaattaccgccgatggtcagggtattactctggtgaatattggcgtgggaccgagtaatgctaaaaccatctgcgatcatctggcagtgctacgcccggatgtctggttgatgattggtcactgtggcggattacgtgaaagtcaggccattggcgattatgtacttgcacacgcttatttacgcgatgaccacgttcttgatgcggttctgccgcccgatattcctattccgagcattgctgaagtgcaacgtgcgctttatgacgccaccaagctggtgagcggcaggcccggtgaggaagtcaaacagcggctacgtactggtactgtggtaaccacagatgacaggaactgggaattacgttacagtgcttctgcacttcgttttaacttaagccgggccgtagcaattgatatggaaagtgcaaccattgccgcgcaaggatatcgtttccgcgtgccatacgggacactactgtgtgttagtgataaaccgttgcatggcgagattaaacttcccggccaggctaaccgtttttatgaaggcgctatttccgaacatctgcaaattggcattcgggcgatcgatttgctgcgcgcagaaggcgaccgactgcatagccgtaaattacgaacctttaatgagccgccgttccgataataagttctgaaccttcttatcagaaatagatgtgaaggagtaagtaagacacctggcaaatagcctgcaataatcgtgggctgtttgcttccttgggcggatacgagttttattatcgtcttaatgatttccacatattaaaagcaagtatgctttcaaaacacaattataaaaaatcccgccaacaatataagtttttataaaattaaatataagattatggctttagaatatttttatttctaatagacgagatttttcctgttatgatataatatgctgaattaacacatgttaacgatttaccagtaatgtaaataaattttcgaggagatcattccagtgggacgtaaatgggccaatattgttgctaaaaaaacggctaaagacggtgcaacgtctaaaatttatgcaaaattcggtgtagaaatctatgctgctgctaaacaaggtgaacccgatccagaattaaacacatctttaaaattcgttattgaacgtgcaaagcaggcacaagttccaaagcacgttattgataaagcaattgataaagccaaaggcggcggagatgaaacgttcgtgcagggacgttatgaaggctttggtcctaatggcagtatgattatcgccgagacattgactagtaatgttaaccgtacgattgctaacgttcgcacaattttcaataaaaaaggcggcaatatcggagcggcaggttctgtcagctatatgtttgacaatacgggtgtgattgtatttaaagggacagaccctgaccatatttttgaaattttacttgaagctgaagttgatgttcgtgatgtgactgaagaagaaggtaacattgttatttatactgaacctactgaccttcataaaggaatcgcggctctaaaagcagctggaatcactgagttcagtacaacagaattagaaatgattgctcaatctgaagttgagctttccccagaagatttagaaatctttgaagggcttgttgatgcccttgaagatgacgacgatgtacaaaaagtttatcataacgtcgcaaatctctaattatcttttaaagaaatctgtctttacggcagatttctttaatctcatataattcttataaaaaatataatattcaactcgtcatattgattatacccccccgttcccagagaaataatatttattaaaattccagttcttctttttctgattacagaaggcaaagtggcaattacgcatagtttcccgataaagacgcgatagcgacatcccgcataaggcatttttctctttatctttgtacggtacttcatggaacagagtttttgaccttgcgaatcgtgatgtctgttggggagggacaatttgctcactgaagcgtgagactcgattaagcgcacgaaacacagaaatcaaaaaacccggtcacttttttacaaggtaaccgggtaaaaataatttttattttttaactgttttgagactcatagagatgtctcaaaactaaaatttggctcctctgactggactcgaaccagtgacatacggattaacagtccgccgttctaccgactgaactacagaggaatcgtgagaacgaggcgaatattagcgatgcccacccacaatgtcaaagcctgttttttaaatttgaaatcgtttgctgaaataatctgcattttgtcgtttattcgctcacaactggctttttttcacacttttgcggctcgggtcgagggtatttccatagccaacgtccagtaaccattcgccagtaaaacagcacggcccgcacagcccagtcggcaaacattcccatccagacaccaaccacaccccagccaagcatgattcccagcacataaccgactacaacccgacaaccccacatgctcaacatgctaacccacatggcgtaacgggcatcacgagcacctttaaatccagcgggtagcacccaactggcggaccaaataggcataaataaagcatttagccaaatcagaatcacaacgacatgtttaacctgtggatcctgggtgtaaaagcttgccataaccccggcaaagggagccgttagccaggcgatggccgttaatccaagagtggaaagccagaacacatgccgcaactgaatctctgcttgcgctatctgccctacccccaaccttcggcctgtaatgatcgtagaagcagagccgagcgcacttccgggtaagttgataagagccgcaatactaaacgcgataaaatttccggcaataacactggtccccatcccggcaacgaacatttgggttaataaccgaccactggtaaataacacactttcgacactcgcgggaataccaatccccatgacttcccagataatgctaaaattcagcggtttaaaatagctctttaagctaatccttagcgcaggattaaaaccaatcgccagcacccacaaaattgcaactgcgccaatataacgagaaatggttaaacccagccctgccccgacaaatcccagtcccggccaggagaaaaggccgtaaatcaatatgccgctaataataatattaagaatattcaggctaccgttaatcaatagcggtattttcgtattccctgcaccacgaagtgccccgctaccaataagagtgatggcagctgctggataactgagtaccgtcagctccagataagtcaacgccagtgctttaacttctgtcgtggcatcacccgcgacgaaatcaataatttgttcgccaaaatgatgaataagcgttgccaacagtacggcaaacaacgtcatgatcaccaaactctgccgcgtcgccaccctcgctcgtcgtcgatcccgcttaccgagactaaatgccacaacgacagtagtaccaagatcgatagcagcaaaaaaagccataatgaccatattgaagctgtccgccaatcccacgccggccatcgcatcttttcccagccagctgaccagaaaagtgctcagaacccccatcaacaggacacaggcattctccatgaagataggaacagcaagcggggttatctcgcgccagaacaacactttgtagctcttgcgtttagcgtgccagcgagtgccgtgaacaacctggcgtaaagcagaggagatattcaaagcgctccttaattgcagaaagtgaaaccacatttcaaataaactgggagaatcagcaaagctgcaaagattttcgccaacaaattgtctgcaaatgcaacaaactgtacttagaaacggcaaacagttggggaatttaaaaatcgggttactcaaaagatttttcgccgttaagatgtgcctcaacaacgattcctctgtagttcagtcggtagaacggcggactgttaatccgtatgtcactggttcgagtccagtcagaggagccaaattcctgaaaagcccgcttttatagcgggatttttgttatatctgataatcaatttcctcttcactgctttccatcacctgccgcttgatatcctcaacactcagtcctgcattacaaagttccagaaagcgccagacatagttacgctgaagttgtcctcgcttcagtcccaaccagacagtattagcatcaaaaagatgccgcgtatccaggcggattaaattctcttcctcttgttcgccactggattgctcggcaactaatccgatcccaagcccaagagcaacataggttttaatgacatcagaatcctgcgcacttaatacaatatctgccagcaaacctttgcgggcaaatgcgtcatcaatacgactgcgccccgtaatcccctgtcggtaagtgattaacggccacttcgctatactttccagcgtcaatggactaatttgcgtcaagggatgatcgtgtggaacaagcaaactatggtgccaacgaaaccacgggaaggcgacgagctgcgggtcattactcaaacgctcgctggcgataccaatatcagcttcgccattttgcaacaatgtcgcaatttcctgtggcgtcccctggattagctcgagccgaacctccgggaaaagttcgcgaaaagctttaatgacctctggcaagctataacgtgcctgagtatgcgtcgttgcaatagtgagaacgccagacgtatcgttggtaaacaggtctgcaagccgacgaacattactggcttcattcagaatacgttctgcaatgaccagtaatgctttgcccggttcagtcatgcccagcagtcgcttacctcgtcgaacaaatatttcgatgccaagttcatcctccagttcccgaatatgacggctgacgccactctgactggtaaaaagcatattcgcaacctctgtcaggttgtaatcctgacgtgcagcctcgcggattatctttagttgttggaaattcacggtaaactccgggcagttcagatttcccgttattgttaaagtctaatgcccggcataacaaataataaaaacccgcatcttattccatcccgatataacacttagctcaccaattgccactgccttttttccatcactggagaactaatcacactcattaacaactctttcactgcctgtgcctgtgggcttaagttcgctctggcgggtaaatttaaactcaaagagagactcatggaaggagtggtaatgcgactcatccacccatttactgcgccacataagctacgcgcggcgctttcgggtaatactgcaacgcccatgccgctggcaatcgctgcggtaagcgtggcaatagactcaatttcaccaataacttttgccgtgagtcgccgtagggaaaaagcctcatcaacacgaagtctaatagcactgtaatcactggggagaaagaggttcatttgcgcaatagcattcacatcaacgctttgccccgggcaatcttgagttcctaccagaaaaagatcttctttcagcaaagcctgactggatacaccagccacaggggaatgctcataaatcaccgccatatcgagttggtgatttatcaatttttcgttaagcactgcaccactattttcatgaagatagataacgatctccggaaattcagcgcgaaccgcctgtaataagggcatggtgatggaactcgcagcggttcctggtgcaaagccaatgctgacttgcccgcttaatgcctgaccaacgttatgcaccgccagttgggcctgttcacactgacgtaaaatggcccgcgcatgggtatagagaatttttccggcgtctgttggtgtaacgccccgctttgtacggatcaaaagttgttgatttaactcaccttccagtgtggcaacctgctggctgagcgctggttgtgcgatatgcaatacttcagcagcctgggtcaggctaccaatatctacaatttttacgaagtatttcaggcgtctgaagttcatgttgcctccggtttttaagaatcggcccaagtgccgccattacttacaaccagattgcaagatgcttgccagttttattttggtgttgatgtacaagctaaccaactgtcaaataagagattatgatagattcgtcatttgctcctttaatcagctgtcgcgttcccctgccctataaaaggagggtatgcaccacgatggttcattacccaataagattgaaagctcaccactttgttgaaattgacagcaaacaaacaaaaaaatgcatttcaccctttgacatcaccatgcactgccattaatatgcgccccgttcacacgattcctctgtagttcagtcggtagaacggcggactgttaatccgtatgtcactggttcgagtccagtcagaggagccaaattcaaaaaagcctgctttctagcaggctttttgctttctaattaccaacgctcttaaaacatctgtctactaccagaactaatttgcacaggcattccgcttcgacgttgcaacgcagcatttgcgcgatttacatcaacttcttgcccgttgataaacgcccgcaaagatggggttaccggcaatggcacttttcggtcagactcatattctgcacgattgcggctcaatggctcatgaacttccagccagttgctgccatctggttcagtggtgtattttactggctggtcgataatttgcacacgcgtcccaacaggaacattatcaaacagatatttgatatcgtcattgcgcagacgaatacagccctgacttacccggagcccaataccaaaattggcattggtaccatggatggcatacaacctgccaatataaatcgcgtacagccccatgggattatcggggcccgcaggaacaaatgcgggcaaactctcccctcgtttcgcatattcgcgccgagtgttcggcgttggcgtccaggttggagcttcttgtttacgttcaacggtagtcacccagttacgcggggtttctcgcccagcctggccgataccaataggaaagacttccacagtattactgtctggtgggtagtaataaagacgcatctcagcgacgttaacaacaatccctttacgaacagtgtcgggcaaaatcagttgctgcggaatggtgagttggctgccagacttcggcaaaaaaacatcagcgcccgggttcgcttccagcatgttacttaacccttgcccgtattgtgcggcaaaagtctccagcggctgggtattgtgatcaggaacagttacagtaaagctctgccccactaaacggctaccctctggaggtaatggataagttaccgccaggctagtatggctggcaaaaagcagagcaaaactgcaaagaatatttacacgacgcatcatgtccctttcctatgtcgcgaaagctatccgttaagtatagcttttatcagacttttcgtttttaactgttcaaatcagaagtcgtattccccggtagaacaatattactggcagcaagttcgcccatgttgttgtatatcgcacaggcagcttcgatgatgggcatcgccagagctgcgccactcccctcacctaaacgcatctccatattgagataaggctccagccccaaatggctgagcgctatacgcgcgcctttttctgcgctcaggtgagaaggaatgagatacggtttgatcgcaggagacatctggcaggctgcgagcgcagcagcataagaaagaaatccatccagcaacacgggtaaaccgcaggaagcagcacctaacatcactccagctattccgaccaaatcaaatccacccacttttgccaggacatcaacaccatcctgaggatttggttgattcaacgtaatcgcccgacgcacaacatcaattttattagccagtttatctgtcggcaggtttgcgccaatcccaaccacttcttcaggatcccggccagtgattgtgctgactattgctgctgccggtgtcgtgtttgccatccccagttcacctacaccaaacagcgtgacaccgttttttgccagctcctgcgtataacatatgacgtccaaaagcaacttttcagcctgacggcgactcattgccggagcactagcaatattgccgctacctcgtgcgacacgcatgttgataagcccggggataggctcagcagtatcaataccaacatcaattacgtggacgttagcgcccgcttgttctgccagcacacacacgccggttgttccacgggtcatattttcagcctgtatggctgtcacttcttttggagaaatagcgaccccttcctcccagacgccgtgatcggcacacataaccagtaccgcttttttgcccacatgcggtatgccattcaaccccggcattcctgccagttgtatggcaagcacctccagctttcccaggctaccaacaggtttgagtaacccgtcaatatgccgttgtgcacggctcatagcggtagaatcgatggctgggatcgtattcagtaaatcggcaagtatttgcatctcacgtctctttatagcagtgccagcaggaagaccagttcaccaagctctatggctgctcccagcgtatcgcccgtttgcccgcccagcgtacgtttgagaagctgaccgaggatgaaaatcgccaccatcgtcaccaccatagcagccacaccatgcatacccggcaataatacggcagcaaaaatagcggctaagccgagtgtgacgcaggtttgtcgcccatcaattttgccaatgaacacattgccaagcccttcttcccgcgcataacgatgacgatacatcaataatgcggcagtcccgcggctgaccgcacatgctgccgccaggcttgcaaggatgctttcgccacgcagagccaactcgcttaacaccagaatctttgccagtaccacaaaaatcaatgccagaccgccgtgggtgcctaaacggctatcacgcatgatttccaacatgcgatcgcggctacgtgcagaaaatacgccatcacaggtatcagcgaggccgtccagatggaatcccccggtcatcagcaccagcacaagtacgctaaacagtgccgccagtggtgcgccacaccatgcctgcagcaccatgaagaccagcccgctaatcgcgccaagcaataatccaatcaaaggaaaagtaataataccgcgagaataatgctcgaaatccagtccctgggaccagcgacgcggtacaggcagacgcgtaataaaactgagcatcgcccaaaataatttactcatttgatttttactccaataccgctaaccaccagccatacttcatttgccgcagcggccaactgctgatttacccgcccggcaatatcacgaaaatgtcgtgccagacgactctccggcacaatccccattcccacttcgttagtcactaatacaacctttgcggggcaacgttggcaggcagcaatcaagctctgaatctcagcattaatcgcctgttccatcgcctgataatcccattcatcagggtctttatcgccgccataatcaaacaacagattagtcaccattgtggtaacgcattcaagcaacacaacctcattcgggttaatgtctgcatgaattaattcatcaagatgttgccagcgctccactgtgcgccagtgctccgggcggccttgccgatgatgttctatccgtgcagccatctcatcatcaaggatttggctggtagcgatatacagaacctgactagagtccccaataagcgcctctgcgtggcgactcttcccgctccgtgcgccccccgtcaccaaaatcatcataccgactcctgattcaaatgtatgatggtattcattgaacagaacaatggatcccccaccgttgctgaccgcaaaacatttacgcgattaatactgcgcgtaatataattaaaaatccagcattctcaatccattacgaaataagatggcattacggaatagccagactttctcgtgttaacgtccgacaaaatgcgtcattgacagcggtttctgtggattgacacatttcattcagataatgaattaatgctactgccggaacaaccagcaaacgggcattgtgttctgaaatccaggctattgattcaacgtcagcgacagatctgcgctgtaaaagaacttgtaaaacaacgtaatagaattatccggaatggtggcgactatgcactagggaaggtgcgaataagtggggaaattcttctcggctgactcagtcatttcatttcttcatgtttgagccgattttttctcccgtaaatgccttgaatcagcctatttagaccgtttcttcgccatttaaggcgttatccccagtttgcagaaactccgtaatgagattaaaagcgctcataactcatctgtcggccagaaggcgcgcctctgaattatccgacggacaaaccgggaacagtgtaatttcccggcaggagcgaaaaaattgaaaggcgcatcttactcttttcgctttcaaaaaaaagagtggtcatcgcgttaacacaccgccctgagatgaattagtgatgttttggctgcaccgcaacatacatttcgatatcccagtacccatcttccgcgccattgttcaaataaacctcgaagcagggctttggtaacatttcataagcactgtcctgcaagagactattaaagaactgataccagggtttagcaaaatcatcaccgactacacgagctaccgccaccgcatactgaccacctgtaatttctgtcagaatgacgccctcactgttttcgggaagcgtaaagtaacccggcaccgtcacgacggtgtcgcagcgtaatttttcggcgggtgtttcatctggattgtcgtaatagacagcaacccactccttcggcacaatatttttgctatctacccacatcatcaactgctcaaagcctttctttaccgtctgttcccacgggccaacgagatggaaacctgcaacggtacgtttctcttcctgcttaatctcgtagttcatgacgcctccattgatactgtttttatatacagtatagttgcaaaattaaaaccacaaggaatgagtgttgattatgcgagcagactcgcactcctgccagtctgctgcaaaagaaaggtcaggccttatggtggaaataatcactcaggcgagaaaacatgctgccttccccgacagattccagggtaaccagcggccagtgcgccacctgtttatcacggtcgtaaagttcaatttcccctacccgctgatgggcgctaattggcgcggtgagttctttaccatcaagggtatatttggctttgatatgtggaatttcggctttcggtagcaccatccagaactcttgttccgttcccaggtcgatattttctttatcgccataccagatgcgttccgttccgacctttttcccacggtgcaaaatttgcaccgtagtaaagttttgttgcccccaacgcagtaattttcttgcctcttcctcacgaccttttgcactgtcagcccccattaccactgcaatgagacgacgctgcccatctacagcgctagcaatgagattaaacccggcaccagaagtatgacccgttttcaggccgtcaacattcatggttttatcccacaacaacccgttacggttttgctgggtgataccgttccaggtgagacttttctcactgtacatatgataaaactcgggctcgccgtggatgatagcacgagaaagcacagctaaatcataagcgctgctatgctggccaggtgcatccagaccatgcactgtttcaaaatgcgtatccttgagatgcagcttctcggcatagttgttcatcatttcaacaaactgccgttgcccaccggcaatatagtcagccagagcaacacaagcgtcatttccggaatccacaattaaaccacggcttaaatcacgtacgcttacgcgatcgccctctttcaaaaacatcagactagaaccgacaaacaccggattatctttcgcccacgcatcgcgccccacggtgacaatatcgtctggcgtaatgcgatgactatcgatagcgcgatccacgacataacccgtcatcagctttgtcaggctggcgggattgcgctgttgatgctcattacccgcggtgaggatctgaccggtggtgtaatccatcaatacccaggacccggcatgaatctctggaggctgaggactaaaaggaatgttttccgccgcaaaaccagagcttaagttaaaaacgaacaaagaagcagcaataataagacggcgtttcaacagcaaaccctcaggagtttcaaatagctgttctttttacggaaatacttatgaactggctggaataaagtgcaagaaaatgtgactaccctctcatttttatctgacatgatctgttgccactcgctgccaaattgtggcgctaaagctgattagcacggtgatatttgatactctggcagacagcagaaataacggatttaacctaatgatgaatgacggtaagcaacaatctacctttttgtttcacgattacgaaacctttggcacgcaccccgcgttagatcgccctgcacagttcgcagccattcgcaccgatagcgaattcaatgtcatcggcgaacccgaagtcttttactgcaagcccgctgatgactatttaccccagccaggagccgtattaattaccggtattaccccgcaggaagcacgggcgaaaggagaaaacgaagccgcgtttgccgcccgtattcacagcctttttaccgtaccgaagacctgtattctgggctacaacaatgtgcgtttcgacgacgaagtcacacgcaacattttttatcgtaatttctacgatccttacgcctggagctggcagcatgataacagccgctgggatttactggatgttatgcgtgcctgttatgccctgcgcccggaaggaataaactggcctgaaaatgatgacggtctaccgagctttcgccttgagcatttaaccaaagcgaatggtattgaacatagcaacgcccacgatgcgatggctgatgtgtacgccactattgcgatggcaaagctggtaaaaacgcgtcagccacgcctgtttgattatctctttacccatcgtaataaacacaaactgatggcgttgattgatgttccgcagatgaaacccctggtgcacgtttccggaatgtttggagcatggcgcggcaataccagctgggtggcaccgctggcgtggcatcctgaaaatcgcaatgccgtaattatggtggatttggcaggagacattagcccattactggaactggatagcgacacattgcgcgagcgtttatataccgcaaaaaccgatcttggcgataacgccgccgttccggttaagctggtgcatatcaataaatgtccggtgctggcccaggcgaatacgctacgcccggaagatgccgaccgactgggaattaatcgtcagcattgcctcgataacctgaaaattctgcgtgaaaatccgcaagtgcgcgaaaaagtggtggcgatattcgcggaagccgaaccgtttacgcctagtgataacgtggatgcacagctttataacggctttttcagtgacgcagatcgtgcagcaatgaaaattgtgctggaaaccgagccgcgtaatttaccggcactggatatcacttttgttgataaacggattgaaaagctgttgttcaattatcgggcacgcaacttcccggggacgctggattatgccgagcagcaacgctggctggagcaccgtcgccaggtcttcacgccagagtttttgcagggttatgctgatgaattgcagatgctggtacaacaatatgccgatgacaaagagaaagtggcgctgttaaaagcactttggcagtacgcggaagagattgtctaatttgaagcctccgccgctggtacggcggaggacaatgttgagtcaggctttttgaacggtgatgctccacgctgcatcgccaatctgctgataatcggtgatggcatgtccttcttctgccgcccactgtgggattgcttcagttgcctgggtgcaatcaaactcaatcactaactcatcgccgctgaccatttctgccagagctgcttttgcttctatgagtggaaacggacagacctgcgtcaccacatccagctttttaatcaccatctttacaccttacttaatttgccgcagcagttgccagtcgcgccttacgctgcggtcgaacatacacaagccaggacgcagtccagactccgagaatcataaatacaaggccaatccagccctgccaggtcatcattgcagtcataaccagtccattaccgatagagcaaccacctgcaatactggcaccgaagcccatcagtacaccacctaacccgctacgtaatgttgtttgtgcatcagctgcgcgaacgcggaactcacggctcgctttggctgcaataaaactccccacgaagatccctaacaccaggaaaacgccccagttaatgtatttcatgtcacccgcgaccagaaattgcagaatattggccgttggggaagtgattcctaacccaaacatgcgtccggttgcttcactcaggggccaggctaaaagcgcaatcaaaccgatgagtacagctgtgacaaagggatgccagcgtttttcaaacagaatatgagcgatcccggttcggcgcggcggtaaggtcgcgactttgagttttggcttcttcaactctttcatcaccacccagagcgttatcaccagcaaaacggcaaccaacggccacacagacaaattaaaagtctcagcaatagagttatgttcagtactgtagtgctgcaaggtttgatttaaaccactggcatgtggagaacgcatcaccgcactcatcaccatataagtgaaaagcgcgatccaactgccgatcaatccctcacccgcgcgataccaggtcccggtggcacatccacccgccagaacaattcccagcccgaagatatacccacctataacagtaccaagccacgggaacgccccggcttcgtaagtcagtaggcccgcctgaattaacgcaaaaacccccacgctttgtacgctaattgcaatcagcaaggcgtaaaacatgcgattatttttcacgatatacatatcgcgaaaaccacctgtcaggcaaaaacgcccacgctgcatgacaaatcccagcagagcaccacaaattagcccgcttaatatcatactaaacataaattaattaaccagatgaatgttaatgaggaaattattcatgactggtggaatgcagaccaataaccaaattctctaaattagaacaaatggttattaatgaggagttcgatacaaaagaataaaaaaaccggagccaaatgttcattcgactccggtttattattagaaaagatgattatgctacgtcttcgtactgcggaaccggattacggaagctcttggtgacgcaagccaggtaaatcagaccgatagcagcccagatcagacccagaaccatactgctttcttccaggttaacccacagcgcaccaacggtcagcgcaccacacatcggcaggaacagatactggaagtgatctttcagcgtcttgttacgcttctcacggatccagaactggctgatgacgctcaggttaacgaaagtgaacgccaccagcgcaccaaagttaatcagcgccgttgccattaccaggtcgaagttgattgccagcagggcaatcgcgccaaccaggatgatgttcatcgccggagtacgccatttcgggtgtacataaccgaagaagcttttcgggaatacgccgtcacgacccattacgtacatcagacgcgctacgcctgcatgcgccgccataccggacgccagtacggtaatggtggagaagatcagcgcgccaacctggaacgctttacccgcaacgtacagcatgatttcaggctgactcgcatccggatctttaaagcgagagatatccgggaagtacagctgcaggaagtaagttgcaaagatgaagatcatgccgccgatcagcgcggtcaggaaaatcgcacgcgggatcacgcgctctgcatctttggtttcttcgctcaggttgctgatgccgtcaaagccggtaaaggagaagcacaggattgtcgccccggtaatcatcgggataacatgcgcatcgccagaccagaatggacgagtgctcgccagcgtaccagcgccttcaccttcaaatacgccataaacaaccatgcccagaatcaccgcgatcagcactacctgcaacacgacgattacagtgttgaagttcgctacggatttcagactacgcaggttaaaggcggtcataaaggccaccagcgccaccacaaacatccagcttgggatggaaggcaccagagcttcaaaatagattttcgccagtagaatgttgatcatcggcgcgaacagatagtcgagcagagaagaccaacccaccataaagccgacagtcgggctaatggatttctgggcgtaagtgtatgcagagccagcagaaggatagcggcgaaccagcttcccgtagctcagagccgtaaacaggatcgcaatcaatgcgaacgcataggctgtcggcacatgaccatccgtgaggccactaacgataccaaaagtatcaaacagcgtcatcggctgcatataggcaagacccatcattacaaccggaactaacgtaagcgttttacgcaattccacgcgagaggtgtttggagtaacgttatggctcatggtcattctcctttacggtgataaccgtcgcgtaagcaaaaaattgccccatttttttggattcctcagcgacaacaactgtcgatttttagtaaatatctatccggtacgaagcccggcctcttggtatgaatgattggtttgaagcaaaaaataaccgacgctgatgaaacgtcggtttttagtcattttttgacagcggcgcattgtgcctaaatgggggggaaatgacaagagaatgagaggcttgtcagaataatttttctttaaatggcactttttccgtcatcagattttgcataaacaccggcgatcgcactatttgctaaaatttcatcccgccaccagccactggcaagtcctgcggtctgttcgttccagccaatccagacgggttcaaagagagtttgggcgaccactttcttctcgattaacgcgccactatcgagaaaacgttgcgccagataacggggtaaatagccgcagccgaggccgctaatttgcagctccagtttggttttaaaatcgaaaacggtaatggcttcttgttcgtcgagaagttgacttgccgtagaagcgcctgcctgcgcagtatcccccaccacaatcgcccgatatcgcttaataatacgacgatttaacggctcttcttccagggctaacggatgatgaggcgcgaccgcaaagacttgttccagatcgcccaaccgactaaaaccaaactcactggaagatggtggctcatgcatcgcgccaacaataatatccgctcgcccctgagtcagggcatcccaactaccaccgagtacgccattgataaacttcaggcgcgtcacgctatgatgttgataaaaagcttcaatgagtggcgcaagcagagaaaaaggaaacgtgtcgtccacgccaatcaccagctcgttttcccagccttcatgcagtttgatcgcctgcttttccagttcccgcacggtatgcagaacttcccgccctttctctaataacatttttccggtgcgggtgaatttagcgcggtgtccgctacgatcaagcaattgaatattaaggtcgctttccagcttgtgaacggtgtaactcagagcggacggcgtcttgtagagtttggcgctcgccgccgcaaaactgccttctttttctaaggcatcgaggatcatcaacacatccagcagtggtttcatacacgcccccttgcagtgcatgcggcgtcctgctggcgtgatcgtttactccagcggcattaccagcggatcgggatactggtattcaaatcccagttcattacaaatccgactgccatcaataatcttacctttgccgctgtccagactatttctgaactgcggaggttccagccccagtaaacgggccatctgcggatagaaaacattacgcgcagggtgagctggcgcacatatattatagatgtgtccgcctttaggtgcctgtaacaacagagtgatagcgccaataacatcttctaaatggactaaattaacaccatgttcaccatcaggcgcggtttttccggcaaagaagcgtccgggatgacgtcccggtccgaccaggcccgcaagacgcagaatatcgacgctagtaccgggtaaattgtgcagccagtcttcgagttcttctaatactcgtccactgttggttactggattacgcggggtggtttctttcaccgtgccttgcgcgtcgccatagacagatgtactgctggtaaaaataatgcggggaatacgatgggccagcgcgctatccactaactcttgtaccgcttgtaaatagaactcatcgccggggccgctacgacgtgccggaagcgtaatgaccagcgcatcggcatccatcagggcatccagatcgtcagaatcgcaaactagctcaggctccatgcgaagcagatagctatcaatgccactcattcgggccgcttcgacaccatcttgtgtggttttactcccggtgacttgccagcctcgcgcactaagactcatcgccagcggcatgcctaaccaccctaacccgacaattgcgacctttttcatccgttatctcctgatacaccttagatctataaggctacgctagcgtatcaaaactgacaattcattctatgaatgaatctgttcaataatgataacgacatgctgcaatgagcagactatcgtcggtaaccgcgtataccagacggtgctcctctgtaatgcgtcgggaccagaaaccactcaaattatgtttcaggggttctggcttccccttaccttcaaatggcgttctgcgggtatctttgataagttcattgatctttttaacaattcgcttatctgtttcctgccagtacagataatcgtcccaactttcctcagaccagattagtttcactcaatgatgtccttttccgttcctttgccacttttcaggctatcgatactgtccatcaatctccgggcgttagcgggggagcgcagtagataagccgtctcttccaggctgttgtattcttcgagactcatcagaacacaagcctctccattctgacgagtaataaggatcggggcatgatcttcaacggctttcatcattgttgcgctcaaattctgacgcgcttcgctgtagctaattgtacgcatgtcaatctcctcttttgtacagttcattgtacaatgatgagcgttaattaactatttattaattagtttgtagatcaaggtattgtcagtgagacgaaaatccaggcttcgctatttttggtgccatcagctaagaggacagtcctcttagccccctcctttccccgctcattcattaaacaaatccattgccataaaatatataaaaaagcccttgctttctaacgtgaaagtggtttaggttaaaagacatcagttgaataaacattcacagagacttttatgacacgcgttcaatttaaacaccaccatcatcaccatcatcctgactaatctttcaggcgatgtgtgctggaagacattcagatcttccagtggtgcatgaacgcatgagaaagcccccggaagatcaccttccgggggcttttttattgcgcggttgataacggttcagacaggtttaaagaggaataacaaaatgacagacaacactcgtttacgcatagctatgcagaaatccggccgtttaagtgatgacagtcgcgaattgctggcgcgctgtggcattaaaattaatcttcacacccagcgcctgatcgcgatggcagaaaacatgccgattgatattctgcgcgtgcgtgacgacgacattcccggtctggtaatggatggcgtggtagaccttgggattatcggcgaaaacgtgctggaagaagagctgcttaaccgccgcgcccagggtgaagatccacgctactttaccctgcgtcgtctggatttcggcggctgtcgtcttagcctggcaacgccggttgatgaagcctgggacggtccgctctccttaaacggtaaacgtatcgccacctcttatcctcacctgctcaagcgttatctcgaccagaaaggcatctcttttaaatcctgcttactgaacggttctgttgaagtcgccccgcgtgccggactggcggatgcgatttgcgatctggtttccaccggtgccacgctggaagctaacggcctgcgcgaagtcgaagttatctatcgcagcaaagcctgcctgattcaacgcgatggcgaaatggaagaatccaaacagcaactgatcgacaaactgctgacccgtattcagggtgtgatccaggcgcgcgaaagtaaatacatcatgatgcacgcaccgaccgaacgtctggatgaagtcatcgccctgctgccaggtgccgaacgcccaactattctgccgctggcgggtgaccaacagcgcgtagcgatgcacatggtcagcagcgaaaccctgttctgggaaaccatggaaaaactgaaagcgctgggtgccagtagtattctggtcctgccgattgagaagatgatggagtgatcgccatgagctttaacacaatcattgactggaatagctgtactgcggagcaacaacgccagctgttaatgcgcccggcgatttccgcctctgaaagcattacccgcactgttaacgatattctcgataacgtgaaagcacgcggcgatgaggccctgcgggaatacagcgcgaagtttgataaaaccacggttaccgcgctgaaggtgtctgcagaggagatcgccgccgccagcgaacgcctgagcgacgagctaaaacaggcgatggcggtggcagtaaagaatattgaaaccttccacactgcgcaaaaactgccgccggtagatgtagaaacgcagccaggcgtgcgttgccagcaggtcacgcgtccggtagctagtgttgggttgtatattcctggcggctccgccccgctcttcagtacggtattaatgctggcgactccggcgagtattgcgggctgtaaaaaagtggtgctgtgcagtccgccgccgattgccgatgagatcctttatgcggcgcagctgtgcggtgtgcaggacgtgtttaacgtcggcggcgcacaggccattgccgcactggcgtttggtacggaatctgtgccaaaagtggacaaaatcttcgggccgggtaacgcctttgtcaccgaagcgaaacgtcaggtgagccagcgtctggacggtgcggcgatcgatatgcccgcaggcccgagcgaagtgctggtgattgctgacagcggcgctacgccggatttcgtggcttctgatttgctctctcaggctgaacacggcccggacagtcaggtgattttactgacgcccgctgctgatatggcgcgtcgcgttgccgaggccgtcgaacgccaactggcagaactgccgcgtgccgaaaccgcccgccaggcactgaacgccagccgcctgatcgtgactaaagatttagcgcagtgcgtggagatctccaaccagtacggcccggagcacctgatcattcagacccgcaacgcccgtgaactggtcgatagcatcaccagcgccggtagcgtatttcttggtgactggagtccggaaagcgcaggtgattacgcctccggcaccaaccacgttctaccgacttacggttacaccgccacctgttccagcctcgggctggcagatttccagaagcgcatgaccgtacaggaactgagcaaagaggggttctccgcgctggctagtaccatagaaacactggccgccgccgagcgcctgaccgcccacaaaaatgccgttactttgcgtgttaacgcccttaaggagcaagcatgagcaccgtgactattaccgatttagcgcgtgaaaacgtccgcaacctgacgccgtatcagagcgcgcgtcgtctgggcggtaacggcgatgtctggctgaacgccaacgaataccccactgccgtggagtttcagcttactcagcaaacgctcaaccgctacccggaatgccagccgaaagcggtgattgaaaattacgcgcaatatgcaggcgtaaaaccggagcaggtgctggtcagccgtggcgcggacgaaggtattgaactgctgattcgcgctttttgcgaaccgggtaaagacgccatcctctactgcccgccaacgtacggcatgtacagcgtcagcgccgaaacgattggcgtcgagtgccgcacagtgccgacgctggacaactggcaactggacttacagggcatttccgacaagctggacggcgtaaaagtggtttatgtttgcagccccaataacccgaccgggcaactgatcaatccgcaggattttcgcaccctgctggagttaacccgcggtaaggcgattgtggttgccgatgaagcctatatcgagttttgcccgcaggcaagcctggctggctggctggcggaatatccgcacctggctattttacgcacactgagcaaagcttttgctctggcggggcttcgttgcggatttacgctggcaaacgaagaagtcatcaacctgctgatgaaagtgatcgccccctacccgctcagcacgccggttgccgacattgcggcccaggcgttaagcccacagggaatcgtcgccatgcgcgaacgggtagcgcaaattattgcagaacgcgaatacctgattgccgcactgaaagagatcccctgcgtagagcaggttttcgactctgaaaccaactacattctggcgcgctttaaagcctccagtgcggtgtttaaatctttgtgggatcagggcattatcttacgtgatcagaataaacaaccctctttaagcggctgcctgcgaattaccgtcggaacccgtgaagaaagccagcgcgtcattgacgccttacgtgcggagcaagtttgatgagtcagaagtatctttttatcgatcgcgatggaaccctgattagcgaaccgccgagtgattttcaggtggaccgttttgataaactcgcctttgaaccgggcgtgatcccggaactgctgaagctgcaaaaagcgggctacaagctggtgatgatcactaatcaggatggtcttggaacacaaagtttcccacaggcggatttcgatggcccgcacaacctgatgatgcagatcttcaccagccaaggcgtacagtttgatgaagtgctgatttgtccgcacctgcccgccgatgagtgcgactgccgtaagccgaaagtaaaactggtggaacgttatctggctgagcaagcgatggatcgcgctaacagttatgtgattggcgatcgcgcgaccgacattcaactggcggaaaacatgggcattactggtttacgctacgaccgcgaaaccctgaactggccaatgattggcgagcaactcaccagacgtgaccgttacgctcacgtagtgcgtaataccaaagagacgcagattgacgttcaggtgtggctggatcgtgaaggtggcagcaagattaacaccggcgttggcttctttgatcatatgctggatcagatcgctacccacggcggtttccgcatggaaatcaacgtcaaaggcgacctctatatcgacgatcaccacaccgtcgaagataccggcctggcgctgggcgaagcgctaaaaatcgccctcggagacaaacgcggtatttgccgctttggttttgtgctaccgatggacgaatgccttgcccgctgcgcgctggatatctctggtcgcccgcacctggaatataaagccgagtttacctaccagcgcgtgggcgatctcagcaccgaaatgatcgagcacttcttccgtagcctcagttacaccatgggcgtgacgctacacctgaaaaccaaaggtaaaaacgatcatcaccgtgtagagagtctgttcaaagcctttggtcgcaccctgcgccaggccatccgcgtggaaggcgataccctgcccagcagcaaaggagtgctgtaatgaacgtggtgatccttgataccggctgcgccaacctgaacagcgtgaagtctgccattgcgcgtcacggttatgaacccaaagtcagccgtgacccggacgtcgtgttgctggccgataaactgtttttacccggcgttggcactgcgcaagcggcgatggatcaggtacgtgagcgcgagctgtttgatctcatcaaagcctgtacccaaccggtgctgggcatctgcttagggatgcaactgctggggcggcgcagcgaagagagcaacggcgtcgacttgctgggcatcatcgacgaagacgtgccgaaaatgaccgactttggtctgccactgccacatatgggctggaaccgcgtttacccgcaggcaggcaaccgcctgtttcaggggattgaagacggcgcgtacttttactttgttcacagctacgcaatgccggtcaatccgtggaccatcgcccagtgtaattacggcgaaccgttcaccgcggcggtacaaaaagataacttctacggcgtgcagttccacccggagcgttctggtgccgctggtgctaagttgctgaaaaacttcctggagatgtgatgattattccggcattagatttaatcgacggcactgtggtgcgtctccatcagggcgattacggcaaacagcgcgattacggtaacgacccgctgccgcgattgcaggattacgccgcgcagggtgccgaagtgctgcacctggtggatctgaccggggcaaaagatccggctaaacgtcaaatcccgctgattaaaaccctggtcgcgggcgttaacgttccggtgcaggttggcggcggcgtgcgtagcgaagaagatgtggcggcgttactggaagcgggcgttgcgcgcgtagtggtcggctccaccgcggtgaaaagtcaagatatggtgaaaggctggtttgaacgcttcggtgccgatgccttagtgctggcgctggatgtccgtattgacgagcaaggcaacaagcaggtggcagtcagcggctggcaagagaacagcggcgttagtctggaacaactggtggaaacctatctgcccgtcggcctgaaacatgtgctgtgtaccgatatcagccgcgacggcacgctggcaggctctaacgtctctttatatgaagaagtgtgcgccagatatccgcaggtggcatttcagtcctccggcggtattggcgacattgatgatgtggcggccctgcgtggcactggtgtgcgcggcgtaatagttggtcgggcattactggaaggtaaattcaccgtgaaggaggccatcgcatgctggcaaaacgcataatcccatgtctcgacgttcgtgatggtcaggtggtgaaaggcgtacagtttcgcaaccatgaaatcattggcgatatcgtgccgctggcaaaacgctacgctgaagaaggcgctgacgaactggtgttctacgatatcaccgcttccagcgatggccgtgtggtagataaaagctgggtatctcgcgtggcggaagtgatcgacattccgttttgtgtggcgggtgggattaagtctctggaagatgccgcgaaaattctttcctttggcgcggataaaatttccatcaactctcctgcgctggcagacccaacattaattactcgcctggccgatcgctttggcgtgcagtgtattgtggtcggtattgatacctggtacgacgccgaaaccggtaaatatcatgtgaatcaatataccggcgatgaaagccgcacccgcgtcactcaatgggaaacgctcgactgggtacaggaagtgcaaaaacgcggtgccggagaaatcgtcctcaatatgatgaatcaggacggcgtgcgtaacggttacgacctcgaacaactgaaaaaagtgcgtgaagtttgccacgtcccgctgattgcctccggtggcgcgggcaccatggaacacttcctcgaagccttccgcgatgccgacgttgacggcgcgctggcagcttccgtattccacaaacaaataatcaatattggtgaattaaaagcgtacctggcaacacagggcgtggagatcaggatatgttaacagaacaacaacgtcgcgaactggactgggaaaaaaccgacggacttatgccggtgattgtgcaacacgcggtatccggcgaagtgctaatgctgggctatatgaacccggaagccttagacaaaaccctcgaaagcggcaaagtcaccttcttcagccgcactaaacagcgactgtggaccaaaggcgaaacgagcggcaatttcctcaacgtagtgagtattgccccggactgcgacaacgacacgttactggtgctggcgaatcccatcggcccgacctgccacaaaggcaccagcagttgcttcggcgacaccgctcaccagtggctgttcctgtatcaactggaacaactgctcgccgagcgcaaatctgccgatccggaaacctcctacaccgccaaactgtatgccagcggcaccaaacgcattgcgcagaaagtgggtgaagaaggcgtggaaaccgcgctggcagcaacggtacatgaccgctttgagctgaccaacgaggcgtctgatttgatgtatcacctgctggtgttgttgcaggatcaggggctggatttaacgacggtaattgagaacctgcgtaaacggcatcagtgagttgcggggtaagcggatgcgatattgttgccgcatccggcaaaaaaacgggcaaggtgtcaccaccctgccctttttctttaaaaccgaaaagattacttcgcgttgtaattgcgtagagcattacgccccagcacaatccccgcgccaaccatgccacccagcagcaccgccagaatcaaggtaattgcctttttcgggctatcacgacgaataggtaacatcggtttcatcacataacggtaagcatgaatatcaagatcatcaacttttaagctttcgatatccagcaggttttgacgagtctgatagtagtttgggctgaacaccaacggacgggtcgcctcatgcttaatcatgctctccagcgcttcgctccccaaaaggaacaacgtatcttgtgtgatatcttcgccagtctgttgaatctgcggttttgtcacctgcgcctgattcgcatactgcaacgcttcctgaatctgacggatacgcagatctttctgctcctgcgcgactacttcctgcgttcttaaagagtcctgcaagtttttccgtcccagagcaatgttgtctttgagatccttttctagctcttgattcactttatcgtcaacttgctgaatgtattgggccaacttcatttgtgcgccctctgcagtttgcccaacataagaaacagtcaatggtaattgctggttcttaacagaaggttcgatggtaagtttttctcgttcttcctgattatccagcgtttctgctaatgcagagaaggcagaactgaagcgaccaattaacgtctcctgcaaatcgcttactttcggtgcagcctgaccatagataacattcatggcattgttatagccagcaatttgccccacgtcgggctgagtgataattgctgtactcgtccatttctccttcgctactgccaaatatccaatagccagggcaatagccacaatgacggaaatgatgattgtcatcttgccacgccacaactgcactagtaaatcaatcaaatcaatctgttccgggtcatggttttgcccagaaacattattattttctactctcatcattaccctaactgacggaaatttccaagtccgcatagtttagcgataatcctcgtgaatgctataggataagtgataaaaataatgaattgttgtgtaagtaacaaaagacaatcagggcgtaaatagccctgataacaagatgttagtcgctgccaaagagatcgcgggtgtataccttatctgccacatccttaagctcttctgccattcggttagagataatgacgtcggcttgttgtttgaaggtggcgagatcacgttccaggcgagagttgaagaaactgtcttctttcatcactggctcgtagatgatcacttcaacacctttcgccttgatacgtttcataatcccctgaatagaagacgcacggaagttatcactaccgctcttcataatcagacgataaatacccaccacttgcggcttgcgactcaaaatggcatcggcaataaaatctttacgcgtgcggttagcatcgacaattgcgctgatcaggttattcggcacagactggtagttcgccagtaactgcttggtatctttcggcagacaataaccaccataaccaaagctcggattgttgtaatggttgccaatacgtgggtcgagacaaacgccttcgattatttgacgggaattcagacctaaactttctgcatagctatccagttcgttaaagtacgccacgcgcatcgccaggtaggtgtttgcaaaaagtttaatcgcttctgcttcagtggagtcggtaaacagcatcgggatattttgcttaatcgcgccttcctgtaacagagcagcgaaacgttctgcgcgttcactacgctcaccgatgacaatacgactaggatggagattatcgtaaagggctttaccctcacggagaaattccggggagaatataatattttcagtgcgatatttcttatgcatcgctgcggtaaaaccaacgggaaccgtacttttgatgaccataaccgcataaggatttatctcaactacgtctttaattacactttctacactggatgtattgaaataattagttttaggatcatagtcggttggagtggcgatgatgacataatcagcatcccggtaggcttcatttttatctaatgtggcattaaagtgtattttatcactttgcaaaaactgctgaatttccttatcaacaataggagatatccgatcattcagcatagcaacgcgactcggtaaaatatctaatgccacaacctcatgattttgtgcgattagaagcccgttactcaagcctacatagccagtaccggaaatggtgattttcatttcatgctctcagaattaacttaactgtgaatcatgatgtttttagcatcctgataagagctaaaagttttaacgctacgttgttcgatggtcaacgcaacgaaaaacaattcagattttctttataagaatagctgatatttattaagttaatattaagcagtgaaatttagtctataagatatttggcaaaaaaaagcccggtgcaatatacgccgggcctcaattttattgttggttaaatcagattaatccagccattcggtatggaacacaccttctttatcaatacgcttataagtatgcgcaccaaaatagtcacgctgtgcctggatcaggttcgcaggcagaacagcagcacggtagctgtcgtaataggcaaccgctgcggagaaggtcggaaccggaataccgttctgtactgcataagcaacgacatcacgcagcgcctgctggtagtcatcggcaatttgcttgaagtacggagccagcaacaggttagcgatctgtggattttcggcataagcatcggtgattttctgcaggaactgcgcacggatgatgcagccagcacggaaaatcttcgcgatttcgccgtagttcagatcccagttgtactcttcagacgcagcacgcagctgagagaagccctgggcgtaagaaacgattttgcccagatacagcgcacgacgaactttttcgatgaactcagccttgtcgcctgctggctgtgcttgcggaccagagagaactttagatgcggcaacacgctgatctttcagagaagagatataacgtgcaaacacagactcggtaatcaggctcagcggttcgccgagatccagcgcgctctggctggtccatttaccggtacctttgttagccgcttcatccaggatcacatcaaccaggtagttaccgtcttcatcttttttggtgaagatatctttggtgatgtcgatcaggtaactgctcagttcaccgttattccactcggtaaaggtctgcgccagttcttcgttggtgaggttcaggccacctttaagcagagaataggcttcagcaatcagctgcatatcgccgtattcaataccgttgtgaaccatcttcacatagtgacctgcgccatcggcaccaatataggtaacgcatggttcaccgtcttcagctacggcggcgattttggtcaggatcggtgctaccaattcataggcttctttctggccaccaggcataatagaaggacctttcagcgccccctcttcaccgccagaaacaccggtaccgatgaagttaaagccctctgcactaagctcacgattacgacgaatagtgtcctggaagaaggtgttaccaccatcaatgatgatgtctcctttatcgagatatggtttgagggaatcaatagcagcatccgtgcctgcacctgctttcaccattaacaggatgcgacgaggcgtttccagagattcgacaaactctttcaccgtatagtaaggaaccagtttcttgcctggattttcggcaatcacttcttccgtcttctcacgggaacggttgaaaatagagacggtataaccacggctttcgatgttgagcgcaaggttgcgtcccatcactgccataccgactacgccgatctgttgcttggacattacatactcctgtcaggtgtgatcaccgcgctgaatgctcgcggcctggaatgttcgcaaataagtatacaaagtacttattaaagtataaatagcttatccatgcttatatgcttacggctttatatgtctccacatgcgatatttcttaaataatgttttattattaccacttttaattcagggataatgtgaggttattaccctcaaataatatgagataaatagtgctgcaacattgcatttttgccccgatttatccatgatcgaattgtgacatttgtcatacaacgaataggttttgtacttactatggaatggattgccgatccgtctatctgggccgggttaatcacgctgattgtgatcgaactggtcctcggcattgataacctggtctttattgccatcctcgccgaaaaactaccgccgaagcagcgtgaccgcgcacgggttaccgggctgctgctggcaatgttaatgcgcctgttactgctggcgagtatctcctggctggtcaccctgactcaaccgctgttcagcttccgcagctttacctttagcgcccgcgacttaatcatgctgtttggtggtttcttcctgttgttcaaagccacgatggagctgaacgaacggctggaagggaaagacagcaataatcccacacaacgcaaaggtgcgaagttctggggcgtggtgacgcaaattgtggtactggacgccattttcagtctcgacagtgtgattaccgccgtcgggatggtcgaccatttactggtcatgatggccgccgtggttatcgctatcagcctgatgttgatggccagcaagccgttaacgcaatttgttaacagtcacccgacgatcgttattctctgcttaagcttcctgttgatgattggctttagcctggtggcagaaggtttcggcttcgtcattccgaaaggctacctgtacgctgccattggtttcagcgtgatgatcgaggcgctcaatcagttggctatctttaaccggcgacgttttctttccgctaaccagacgctgcgccagcggactaccgaagcggtaatgcgcctgcttagcgggcaaaaagaagatgcggaactggacgccgaaaccgcgtccatgctggtggatcatggtaaccagcagatctttaatccgcaggaacggcggatgattgagcgggtacttaatcttaaccagcgtaccgtcagcagcattatgacgagccgccacgatattgagcatatcgatctcaacgcgccggaagaagaaatccgccagttgctggagcgaaatcagcatacgcggctggtggttaccgacggtgatgacgcagaagatttgctcggtgttgttcacgttatcgacctgctacaacagtctctgcgcggcgaaccgctcaacctgcgggtgttgattcgccagccgctggtgttcccggaaaccttgccgttgttacctgccctggagcagttccgtaatgcccgcacgcactttgcttttgtggtggatgagtttggcagcgtggaagggattgtgacattaagtgacgtcactgaaaccattgccggtaacttaccgaacgaagtggaagagatcgacgcccgccatgatattcagaagaatgcggacggttcctggacggcgaatggtcatatgccgctggaggatctggtgcaatatgtgccgctgccgctggatgaaaaacgtgaatatcacaccattgccgggctgttgatggagtatttgcagcgtattccaaaacctggcgaagaagttcaggtgggggattatttgcttaaaacgttgcaggtagaaagccatcgcgtgcagaaggtgcagattataccgctgcgtaaggatggcgagatggagtacgaggtgtgatggtatcggtcattttacccaatagccgaaaggaataagatgagggaaccgcgccatcggcgatttaccgccgggagcccgggttgccagggtggtggagattgagccaccctggcacgttcaccggcttgagcgttccatagtagcgaggaacatcaagtgaacggaacagccttcgatcttacatattcagaatataatgatgccgccacgaacgcctgatgcgacgctttacgcgtcttatcaggcctacaggactggtcacctggtaacttacatcttctccagcaacttcttcacatctttgccattacgggaatctttattccgctcggcccagtcattcaggcgacgtttcgcttcgtcctgtagatgtttgcgcagtaactgatccacttgcaggctgtaattgagttgctgccagttgccataaacccgcagcggtactggcgtttctttcaggaaatcaatcagtttgctttccccgttccagccacccacgacccgaatatcaaactgggtgtcgcaggtttgatctgccagattcaacatgccttcccctgtcagcgccagcacagggctttgaccttgcatgtcgtttaacgtcacgacgccatccttcaacgtcaaatcggtggtaaagcggtcaagccgcgtcacgttatcaaagttttcagcggccttcacatcaccgccattacgctctaccgcttgctgaatcatctgctggaagttcatcccttccatgcgcgtgtcggtcatttcgacatgtgcctgtccttgccagttgtggcggaatgcgtcggcatctatgtcagcaccggagaaatcaccagccagactcatttttccggtcaagctaatcggatagttaaacgccttcagaatggtaccaatctcaacgttttccagccgtggctggaagtttatccgcggatttatacttgtcgcgtccagcgtgcccggcagactaacctgtccaccgttaagtttgccctgcagttgagtaatttccagcaaaccgctcttgttggtcatttgcgtggcaacatctgtaaaattcattccgcgccagcgcacgttactggcctgcaacaaaatatcagccgtaaagccttgcagtccctgataggccggttcatcaatacggctagaaatgaccgggcgcggcaacgtactttggctctgcccctgctgcgcggcaccgttttcaccattcgcggtttcattaagcgggatgaggttgtcaagattcagttgcgggaattgcagcctcagctgccattccggtttctctgtcagcgtaacctgtgcttgcccgcttagcgtactatcattggcggtcaaactaatttggttaaaactaaggcgtttatgactctcctgccactgggcctggaaactcccctgcccctgaataccttgttttggtaaatcggcaccctgcaactgccagttaatttgttcaatagccgccgttaaatcatgcggataatcagaagcatctaccgtaccgttaagggatatcgtgagatcgcgctgatcgcgattaacccgcccggagaactcaaaactaccacgatgttggggatcttgttccatttgcaggcgaatattgcggattgtcacctgctcgtcatcttcatgctggaacaccagcacgctgtccgccaccttaagactggatatatcaaagctccatccgcgatcgtcactcagatccggcaaggtattgtcgcgcggtgcaaccggagcgtcttcactgcgcaccgcttccgtctgcggcgtcagttggatcactgccccttttagcatcacctgcttaacgctcagttgatgactcagtagtggtaaaagcgccacgtccagacgcatgttgtcggcgcgaaccagtggctggcttgcgccctgggcggtgagagacattcgcccggagaggatactaagctgcggccagacgtgccaacgcagtggcccgtcgagctgcaattgataaccgctacgtgcagcaacttgcttgaccatatagtcgcggaaatcattcggattcaccagcaacactaacgcagataacccggccaccagcacgaccaggagtatcatcagcgtcgtcagaaatcgtctcatggtatcctcaatgggcctgaattagtctttatcgattcggctggctaccgcgccctgctggttgcgatatttcgcatcttcacggcggttgtaaggtcgcaccgccgggccggaaagcggctcaaagctcagcgcaccaattaacatgcccggacgcagcgccagcggcagcttaccggagttgtagaactccagcacaatgcaaccagaccagcccggatcgatgcggtgcgcggtgacgtgcaccatcagccccagacgcgccagactggaacgcccgtccagccagcccaccagatcggctggcagcgtcacgctctccagcgtcaccgccagcgccagctctcctgggtgaagatagaacgcctcgccctcgtcgagaacgatctcatcgctcatcacgcggtcaagcgcggcgctcacttcatctttgggaccgctcagatcgataaacgctgccgtgtgaccacggaaggtacgaaatttattgcccaggcgtacatccaccgtcgcgccgttaatacgctccactggcggacgtgggttgatgctcaaacggccttcatcaagccaggcttcaatatctcggtcacacagacgcatggcattttctcctttcgcgcatcactcccttaacgccaattacgtcaagggcatactaggttatcactgaacggtacacaatttatcaagcttattcaaagaactgacttattttcgctttcaatatatcgatcgcgatgcggtttttcccgccgcgcggcacgataatgtccgcatattgtttagaaggctcaatgaattgcaggaacatcgggcgcacggttttttgatattgcgccatcacactatccatactacgcccacgctcgttaacgtcacgcttgatgcggcgcatcaggcagatatccagcggggtatcaacgaaaatggagaagttaagttcgtcacgcaaacgcgcatccgtcagcaacaaaatgccttcgagaatgatgaccttcttcggctcaaccgtcaccgtttctttcatacgcgtatgttcaacatagctgtaaaccggcaggtcaattgcgctgccgcgtttcaacgcttgtaaatgctcaagcagcagactgtgatccatcgcgctgggatggtcgtagttggtcttaacgcgttcttccatgctcagatggctttgatctttgtaatagcagtcttcgggaattacgccgatgtgttcatcaccgacttgctcacgcaattcacgataaagggtactggcaataagactcttgccggaagcgcttgcgccagcgataccgataatgacgcactgatgagactgatcagtcatatatttagcgacctgattaacctggatgttaggaagggggcgacgaagcgccaaacgcggcaattatagggatttcatccgtctgataccagtcgaatagcgttgccgcgcgctcagagttaattgttgacaaagaattcccgggggcaaattacgttgatcagttttatgtaaggtaaaaaatgttaaacgcagttgcgcaaattatccgcctttacgtcactttatgagcaattcgcatataaaatgtaaaacttttgtactagcataaacacagaaacgaatactggcgaccaggtcttgcggataaagcggtaatgagcaaacaaagtcagcatgtattaattgccctgccccacccgctgcttcacctggtcagtttaggtttagtcagctttatctttacccttttcagccttgagcttagccagtttggcacccaactcgccccactgtggttcccgacgtccatcatgatggtggcgttttatcgccatgccgggcgcatgtggccgggaattgcgctgagctgtagcctgggaaatatcgccgcatccatcctgcttttttccaccagcagcctgaacatgacctggacgaccatcaatattgttgaagccgtggtcggggcagtgctgctacgtaaattgctgccgtggtataaccccttgcaaaatctggctgactggctgcgtctggcactcggcagcgccattgttccgcctctgttggggggtgttctggttgtcctgctgacgcccggagacgatcctctcagggcatttttgatatgggtactgagtgaatccatcggcgctctggcactggtgccgctgggattgttatttaaaccacactatctgctgcgccatcgcaacccacggttgctttttgagagcctgctcacgttagccatcacactgacgttaagctggcttagcatgctgtatctgccgtggccttttactttcattattgtgctgttgatgtggagcgccgtgcgtctgccacgaatggaagcctttttgatcttccttaccacggtgatgatggtgagcctgatgatggccgcggatccccccctgcttgctacgccgcgtacgtacctgatgagccatatgccgtggctaccgtttttgctgatcctgctgcccgccaacatcatgaccatggtgatgtatgcctttcgtgcggaacgcaaacacatttccgaaagcgaaacccactttcggaacgcgatggaatattccgctatcggtatggcgttagtgggcaccgagggacaatggctgcaaaccaacaaagcgctctgccagtttctcgggtacagtcaggaagagctgcgcggactcacctttcagcaactgacctggccggaggatctcaataaagatctccaacaggttgaaaagctgataagcggtgaaataaacacctatagtatggaaaaacgctactacaaccgcaatggcgatgttgtctgggcgttgcttgccgtcagtctggtgcgccacacggatggcacgccgctctattttatcgctcagattgaagacattaacgagctaaaacgcaccgaacaggtcaatcagcaactgatggagcgcatcactctggctaacgaagcgggcgggattggcatctgggagtgggagttgaagccgaatatttttagctgggataagcggatgttcgagctgtatgaaattcctccacatatcaaaccgaactggcaggtgtggtacgagtgcgtgctgccggaagatcgccagcatgccgaaaaagtgattcgtgatagcttgcaaagtcgcagcccctttaaactggaatttcgcattaccgtaaaagacggtattcgccatatccgcgccctcgccaaccgggtactgaataaagaaggcgaagtcgaacgtctcctcggcatcaatatggatatgaccgaagtgaaacagcttaacgaggcattgtttcaggaaaaagagcgcctgcacattacgcttgattccatcggtgaagccgtggtctgtattgatatggcgatgaaaattacctttatgaatccagtggcggagaagatgagcggctggacgcaggaagaagcgttaggtgttccgctcctgacggtgttgcatattacttttggcgacaacggaccattaatggagaacatttacagtgccgacaccagtcgttccgcgatcgagcaagatgtggtgttgcactgtcggagcggcggcagttacgacgtgcattacagtattacgccgttaagtactctggacggcagcaatattggtagcgttctggtgattcaggacgttaccgaaagtcgcaaaatgctgcgccagctgagctacagcgcctcccatgatgcactgacgcatctcgccaaccgcgccagttttgagaaacaactgcgtatcctgctgcaaacggtaaacagtacacatcagcgacatgccctggtgtttatcgatcttgatcgctttaaagcggtgaatgacagcgccgggcatgcggcgggtgacgctttgctgcgcgaactggcgagcttaatgctgagtatgctgcgttccagcgacgtgctggcgcgactcggtggggatgaatttggtctgctgctaccagactgtaatgttgaaagcgcgcgttttatcgctacacgcattatcagtgccgtgaatgactatcactttatatgggaaggccgtgtgcatcgggtaggtgccagtgccgggattaccttgattgatgacaacaatcatcaggcggcagaagtgatgagccaggctgatatcgcctgttatgcctccaaaaatggtggccggggccgggtgacggtttacgaaccgcagcaagctgccgcacatagcgaacgggcggcgatgagccttgatgaacagtggcggatgattaaagagaatcagttgatgatgctcgcccacggtgtcgctagcccacggatcccggaagcgcgtaatttgtggctgattagtcttaagctctggagttgcgaaggcgagattattgatgaacaaacatttcgtcgtagcttcagcgatccggcgcttagccatgctcttgaccgccgggtattccacgaatttttccagcaggccgcaaaagcggttgccagtaaaggcataagcatctccctccccctttccgttgccggtttgagtagcgccacgctggtgaatgatctgcttgagcagctggaaaatagccctctaccaccacggttattacatctgattattccggctgaagcgattttagatcacgcagaaagcgtgcaaaaactgcggctggcgggatgtcggatagtgctcagccaggtgggccgcgatctgcaaatcttcaacagcctgaaagcgaatatggcagattacctgctacttgatggtgagttatgcgccaacgtgcagggtaatttgatggatgagatgctgattacgattattcaggggcacgctcagcgactcgggatgaaaaccatcgccgggccagtcgttttacccttagtgatggatacgctttctggcatcggcgtcgatctgatttatggtgaggtgattgccgatgcccaaccgctggatttgctggtgaatagtagttatttcgcgattaactgaggcgtgcttccccatcgcctgatgcgacgctaacgcgtcttatcatgcctacaaatcgctcattccccaggccggataaggcgctcgcaccgcatccggcgaccaacgtcatgcttcgtctggttgccagccttccgtataccagatatgcaacagcgcataagaacgccagggcttccagcgctcggcataacggcggatttgcgccggtgtcattcccggaaatcgctgtttaatcagataatcatccggcaggaaaacatctttcgcctgccagccacgcaaagcaaaataattcgccgtccagcgcccgatacccggaaaagtttgcagcgttttcatcgcctgctccacatcgcccggtattgtcattggtaaggtgccctccagcgccgcatttgccagatgaatcagcgcctctgcccgtttcaacggcatacctaacgcttttaatgcctgcgggtctgctgctgccagccgctgaggcgtcgggaagcagatatactccggaaaatcatccagccgttcgccataaagctgtgccactctggcggtcaattttgccgccatcgccacgctcaccagttggcctaaaatcgcccgcacgccctgctcaaaagcatcaacacagccgggtaaacgcaatccgggccgcgccgcgcctaacctgcccaacgcaccgttaacaatttgtgggttacattgcagatcaaacaggcggctcattttcgccagacactctgcggcaacaggttctaaacctgcacttaaatttatgtgcagagtatggcgggctatatccggaatagcagtcaccacgccgcgatattcgcccaccgccagactacgggcataataactgtccgcgaccgtttccacactgctcaccgcacgggcggcgagaaatcccaacatccagctccagtcatacggcggctgccagttcagggtatacatcgcatctccttattcatccgctttcagcataaacgttattcagacgctgcgctttgctttcatattccggttgtcgcgacggcaacatttcgctaaagtcacgccccttcttcaccggcatggggattatttcgtgtttattggttttgattacggtacagcaaactgtagtgtggcggtcatgcgtgacggtaaaccgcatttgctaaaaatggaaaacgacagcacgctgctgcctagtatgctttgcgcgccaacgcgtgaagcggtaagcgaatggctgtaccgccatcatgatgttccggcagacgacgatgaaacgcaggcgctgttacgtcgggcgattcgttataaccgcgaagaagatatcgatgttacggcgaaaagcgtgcagttcggtctttccagtctggcacagtacattgatgatccagaagaagtgtggtttgtgaaaagtccaaaaagcttcctcggtgccagcggcttaaaaccgcagcaggtagcgctgtttgaggatctggtctgcgcaatgatgttgcacattcgccagcaggcgcaggcacagctgccagaagcgattactcaggcggtgattggtcgtccgatcaacttccaggggctgggcggtgatgaagcaaacacccaggcgcaagggattctggaacgcgcggcgaagcgtgccggattcagggacgtggtattccagtacgagccggtcgcggctgggctggattacgaagccaccttgcaggaagaaaaacgggtgctggtggtggatatcggcggtggtacgactgactgtagtttgctgctgatggggccgcagtggcgtagccgtctcgatcgtgaagccagcctgctgggtcacagtggttgccgtattggcggtaacgatctggatatcgcgctggcgtttaaaaacctgatgccactgctgggtatgggtggcgaaaccgaaaaaggcatcgccctgccgatcctgccgtggtggaatgcggttgccatcaacgacgtacctgcgcagagtgatttctacagtagtgccaacggtcgtctgcttaacgatctggtacgcgatgcccgcgaaccggaaaaagtggccctgttacagaaagtctggcgtcagcgtttaagctatcgcctggtgcgtagcgcagaagagtgcaaaattgctcttagtagcgtagcggaaacccgcgccagtctgccgtttatcagcaatgaactggctacgctgattagccagcgagggctggaaagcgccctcagccagccactgacgcggattctggaacaggtgcaactggccctggataacgcccaggaaaaaccggacgttatctacctgaccggcggtagcgcccgttctccgctgattaaaaaagcgctggcagaacagttgccgggcattccgattgcaggcggcgatgactttggctccgtcaccgccgggctggcacgctgggcggaagtggtgtttcgttaattgaaaaatggctcagcagcggcttaaatctgcctgcgcctgagccagtttttctgctgcctgacgtaacggttccatcaacggcatggtccgtgctggagcatgaaggcggaatcgctgcaactctgtcgcgccgactgtcaacgcgctttccagccgatgtcgtttggcggtcattttcgccattaccgcttgtctgtctgctggcgttatcgcttcattcggcctgaacacaaaacggcgttcacagctcgctttccagtcgataaccgcctgggtcagatggtcgccaaaccctttcacttgcttaacgccacgacgggtaacatctgcggctgtttcaataccaaaagaccgtaacgccgctttacgcgcagggccaacgccgggaatagaggcaacatcaataaaaaatccctccagaaacttctgcttctgccgttcccttgcagtgtcatgaagtgctgccagagcgcgtttctcttcttccggtaacccgagaatttcgtccttcattttttcgagcatcgtccgtttggcgataaaaccttccaggccgcctacctgctggatctggcggactaaatggtcatagtccattttcgcacgattaaatgcctcacggcgttgctgaacttctgctttgtacgctttgcttgtcagactgccaataatccagatagccgccagcacaggaaccaaaataatataacgcggttctgcctgaaggccgcaaagcagcaggcttaatgcactcagtgcgatctcaagcagaatgatgtattcgcgccgtaacaggcctaaaggaagcggcctgccagtcggttggaaatgatcgggtaatggcagttgcaatgctggcggtgctacactcgccatcaccatcgcccagactttcgccagcacaaaattcccgccggtggtaatgacctcttcgccgagatcaataaaatagataacaccttgattatccagcgcacaccacgggcagtcagtcaaatgagcggggtaaacatgcattgcactaacgatacatttctttaactgttggcgtagagagtccagtgccgctacccacgctttagccgtcggacgcccggttgccacgccactttccgtgaatgcctgctgaaacatggcttcaacatcactcggtaacatgcttagcggaatagatcgtggcggcggttttaaaccacgtcgctgattatcactcgcgtaggcataacggaaatgggtaatatccgtctccagcgcattacccgcatcagagataagcggcacaccagaataaggatgccgcccaccaaacaagacgtgaaaaattagcaacgcaaggccaaaattatcgtgattttctgtgcgttcaaaaccgacaaaacttggcaaggtttgtagctctggcggcgtaaaatggctcacgccgacttcgcataaatgcagtgtgccattggcgttaatttgaaaggagtcgctatcaatcagtaccactttgctgtcgcgacctaccataaaactgttctggtttacgtcacccacgacgtgcccgtgctcgtgaaccgtagcaaaagaactagcaatattgcgcgcaacatagagtagaaaatcccacgcacaatgagggtaactctggcgacgatgtgccgggctatagatcatatgaatcggttctttaccagaaacttttggcatcataaaaccgataacttttccgcctcgtccaccgtgaagcgttgcctgcggccaggcgacataattcaacaactgcgcgtcagctgtcgcagccataaaggcaagtttgtcctgttttaaggcgggtggcggcgtgtgataaatcttggcgacgctatcgacaaactcctcgatatcataaaccgcgccttcaccacctttgcccagttcacggccaagagtggtcaattcacctgtgcttgtaaatacttttatatttgttttcataatatttcgcgggtagttatattatatttcaatgaataataacaactaaccattaaaattatttctatatggggaaaacccactcaagaataaaaatgataatgcaattttatcaggatacaattcaatttcggcctgataatgattaacttccacaggtttttgctaactttgactacaaagggattctggagaaaaaatgaaaaagatattacttatgttgagtctgctattttttactaccgcgggctttagtgaagttagcgatacgttagtgacgggaggttatgataaacaagcgatgtctgacgcgattaaacatgcgcggaaagaaaccgataaattcatcgaggttatgaataaaaaagatgccgatactttcgcagtcaaagccccgataaccgatcacggaagaaccgagcatttctggcttacggatgtcacttattctaacggcatgtttattggcgtaatcagcaatgaccctggtattgttacaaacgtagaatatggccaggagtggaaaatcaagaaagaagatattagtgactggatgtatacgcgcggggataaaatttacggcggttataccattgatcctttattggtcacctatccaaaagaagaagccgacgagctaagagcaaaattagttcgctaatcagccgttatatttattgtttaaactggcggttgaattgttgtcttcaaccgccatgagaaactcactctgcccacagcgccagtgccaacgttttatcatcatccgtacgctcgtttaccgccgggctggacaaaaactgctttaacaattcaggtaataaatcgagttgttcctgcgttgctgccgccagtccattgaaaaacggggtaaagaaaggcacatgaggagaattatccagcatatttaacgccagtcgctggataccatccgtaaatgctgcaactttgtgcgcacgcccagtgctggtgagagtttccagtctggaaacggcatcttcgtcggtaatgaagtgcgtcatgttggcatattcacccgccatcggcgtgagaggcaattgcagaccgtgacccaaatctaccaccacgccgccatcgccaatctgcataatcaaggtgccgtcagggctactaatcagtcccagaaatgtgcaggcaaaatcgcgaaccgctaattctttggcttccgcctcggcaaaaagtcgttgacgaatggtcagtaccatatttgtggcgaggacatcattaagccccaattccccgccctgcactttttggctcatataagccatcgcttcattgacggcgagcatcgcgccttcgccaccctggctgacactgcctgcgccatcagcgacaaatacgctcaataatggctgctggtcatttaaccaggcaatctgcatctggcaggcatcctgacaaggcaagtccgcgctgatgtggctcgttccaacggtacttgcatagaccagacgccagctcacacactcgtccagccttttggcgcttccagcacaacttccgttcccggcgtggagcgggaaacgctacgcaggctactggataaccagctaaacagttcacggaattgtaatccttgcagaggcaaaggctgacgaacgctaatttgtgccagcgtcttcatatccgccccctgaacaccgatggaaaagaaagcaaaccttttatcttcttccccccgaaacactttgttggctgcagcctgccactcatcggttggtgcaccatcggtaatcaggaaaatccacgggcgataatagctaataccatttgcacgatactcacgtttccgctcctctaccatatccagggctttggtaatggccgcacccattggtgtatcgccctgggcaaacaggatgggcggaaaaaaattagcggcgctggtaaagggttgttccacatgcaccgggccgaacgtcacaatgccgagttccactctttttaaagccagcggatcagcaagcagttcatcacgaaaggtaaccaatccggcgttaagttcattaataggtctaccgttcatagaaccagaaacatccagcagcaaaatgcaggggcaacgtggttccgggttactggcaaaatcgctggtggcaaacgtgatttgttcgctcataagaaatcctttcttagagaattatcgaggtccggtatcataccgactgcaataatgaaataagagcaaacgaagaaactttcagaattaggcccggcggcgcagaaaattttgctattcgcctcgcaagaacggagagccgtcgattgacactaagggcggagtgacataatttcaggagtgagggttagggagaggtttccccctccccctggtgttcttagtaagcctggaagctaatcactaagagtatcaccagtatgatgacgtgcttcatcataaccctttccttattaaaagccctcttctccgggagaggctttcccgtttcagcgtcccgctgaaatcatcggcttacctcctttcgccctgaatgcagtctatcgctaacgcgtgaataaaatagtttcctctgtgattattgcgtaacgactcgcaaagaatatttgctggcaggatcgcagactacaaagcctgcggattgacaatcttatcgtgaagacatactttcaggagtgagggtagagcggggtttcccccgccctggtagtcttagtaagcggggaagcttatgactaagagcaccacgatgatgagtagcttcatcatgaccctttccttatttatggccccttcctcgggaggggctttcccgtttcagcgtcccgctgaaatcgtcggcttacctcctttcgccatgcaagcagtctatcgctaacgcgtagataaaatagtttcctgtgttattactggatgcgtgctcgcaaatgtgcccgtcattcagacgattccagacagtgtttcataattcctccatttttctcccttattggctggctacactagtatcattccgcgaaacgtttcaggaagagaaactcttaacgatgaaaggtagttataaatcccgttgggtaatcgtaatcgtggtggttatcgccgccatcgccgcattctggttctggcaaggccgcaatgactcccggagtgcagccccaggggcgacgaaacaagcgcagcaaagcccagcgggtggtcgacgtggtatgcgttccggcccattagccccggttcaggcggcgaccgccgtagaacaggcagttccgcgttacctcaccgggcttggcaccattaccgccgctaataccgttacggtgcgcagccgcgtggacggccaactgatagcgttacatttccaggaaggccagcaggtcaaagcaggcgatttactggcagaaattgaccccagccagttcaaagttgcattagcacaagcccagggccaactggcaaaagataaagccacgcttgccaacgcccgccgtgacctggcgcgttatcaacaactggcaaaaaccaatctcgtttcccgccaggagctggatgcccaacaggcgctggtcagtgaaaccgaaggcaccattaaggctgatgaagcaagcgttgccagcgcgcagctgcaactcgactggagccggattaccgcaccagtcgatggtcgcgttggtctcaagcaggttgatgttggtaaccaaatctccagtggtgataccaccgggatcgtggtgatcacccagacgcatcctatcgatttagtctttaccctgccggaaagcgatatcgctaccgtagtgcaggcgcagaaagccggaaaaccgctggtggtagaagcctgggatcgcaccaacagcaagaaattaagtgaaggcacgctgttaagtctagataaccaaatcgatgccactaccggtacgattaaagtgaaagcacgctttaataatcaggatgatgcgctgtttcccaatcagtttgttaacgcgcgcatgttagtcgacaccgaacaaaacgccgtagtgatcccaacagccgccctgcaaatgggcaatgaaggccattttgtctgggtgctgaatagcgaaaacaaggtcagcaaacatctggtgacgccgggcattcaggacagtcagaaagtggtgatccgtgcaggtatttctgcgggcgatcgcgtggtgacagacggcattgatcgcctgaccgaaggggcgaaagtggaagtggtggaagcccagagcgccactactccggaagagaaagccaccagccgcgaatacgcgaaaaaaggagcacgctcctgatgcaggtgttacccccgagcagcacaggcggcccgagccgcctgtttattatgcgtcctgtggccaccacgctgctgatggtggcgatcttactcgccgggattatcggttatcgcgccctgcccgttagcgcgctgccggaagtggactatccgaccattcaggtggtcacgctctacccaggtgccagcccggatgtcatgacctctgccgttaccgcgccgctagaacgccagttcgggcagatgtctggcctgaaacagatgagcagccaaagttccggcggtgcgagtgttatcactttgcagttccagctaacattaccgctcgatgtcgccgagcaggaagtgcaggccgcgattaacgctgcgaccaacttgttgccgagcgatctgcctaacccgccggtttacagcaaagtgaacccggcagatccgccgatcatgacgctcgccgtcaccagtaccgccatgccgatgacgcaagtggaagatatggtggaaacccgcgtcgcgcagaaaatcagccagatttccggcgtcggcctggtgacgctttccggcggtcagcgtccggctgttcgcgtcaaacttaacgctcaggcgattgccgccctcggcctgaccagcgaaaccgtgcgcaccgccattaccggcgctaacgttaacagcgcaaaaggtagcctcgacggcccttcccgtgcggtcacgctttccgcgaacgaccagatgcaatccgccgaagagtatcgccagctaatcatcgcctaccagaacggcgcgccaattcgtctgggcgatgtcgcaactgtagagcaaggtgcagaaaacagctggctcggcgcgtgggcgaacaaagaacaggccattgtgatgaatgttcagcgccagcccggtgctaacattatctccaccgccgacagcattcggcagatgctgccacagctcactgagagtctgccgaaaagcgtgaaggtgacagtgctttccgatcgcaccaccaatatccgcgcatccgtcgatgatactcagtttgaattgatgatggctatcgcgctggtagtcatgattatctacctgtttttgcgcaatattccggcgaccatcattcccggtgttgctgtaccgctgagcttaatcggcactttcgcggttatggtgtttctcgattttagtatcaataacctgacactgatggcgttaactatcgccaccggattcgtggtcgatgacgccatcgtggtgatcgaaaacatttcccgctatatcgaaaaaggcgaaaaaccgttggcggcggcgctcaagggcgcaggtgaaatcggctttaccattatcagcctgaccttcagtctgattgcggtgttgatcccactgctgtttatgggcgatatcgtcgggcgactgttccgcgaatttgctattaccctggcggtagcgattttgatcagtgcggtggtgagcctgaccctgacaccgatgatgtgcgcgcggatgctcagccaggagagcttgcgtaaacagaaccgcttctcccgtgccagcgaaaaaatgttcgacaggataatcgccgcctatggtcgtggactggcgaaagtgctgaatcatccgtggctgaccttaagcgtggcactcagcacgctgctgcttagcgtgctgctgtgggtgttcattccgaaaggtttcttcccggtacaggacaatggcattattcagggcactttgcaggcaccgcaatccagctcctttgccaatatggcccagcgacaacgccaggtcgcggacgtgattttgcaggatccggcagtgcaaagcctgaccagttttgttggcgttgatggcactaacccgagcctgaacagtgcacgtttacaaatcaacctcaaaccgttggatgaacgtgatgatcgggtgcaaaaagtcatcgcccgtctgcaaacggcggtagataaagtgccgggcgtcgatctcttcctgcaaccaacgcaggatctgactattgatactcaggtcagccgcacccagtaccagtttaccttgcaggccacgagtctggatgcgctcagtacctgggtgccacagttgatggaaaaactccagcaactgccacagctttctgatgtctccagcgactggcaggacaaagggctggtggcgtatgtcaatgttgatcgcgacagcgccagccgtctggggatcagcatggcggatgtcgataacgccctgtacaacgcgtttggtcagcggctgatttccactatttatactcaggccaaccagtatcgcgtggtgctggagcacaacaccgaaaataccccaggcctcgcggcgctggataccattcgcctgaccagcagcgacggcggcgtggtgccgctaagcagtattgccaaaattgagcagcgttttgcgccgctctccatcaaccatctggatcagttcccggtaacgaccatctcctttaacgtgccggataactatagcctgggcgatgcggtgcaggcgattatggacaccgaaaagacgctgaatctgccggtggatatcaccacgcagttccagggcagcaccctcgccttccagagcgcgctgggcagcactgtctggctgattgtcgcggcggtggtggcgatgtatatcgtgctcggcattctgtacgagagctttattcacccgatcaccattctcagcacgctacccaccgcaggggttggcgcactgctggcgttgctgattgctggtagcgaactggatgtgattgcgattatcggcattattttgctgatcggtatcgtgaagaagaacgccatcatgatgatcgacttcgcgctggctgctgagcgcgagcaaggcatgagcccgcgcgaggcaatctaccaggcttgtctgttgcgttttcgtccgatcctgatgaccactctggcggctctgcttggcgcgctgccgctgatgttgagtaccggggtcggcgcggaactgcgtcgtccgttaggtatcggcatggtcggcggtctgattgtcagccaggtgctgacgctgtttaccacgccggtgatttatttgctgttcgaccgcctggcattgtggaccaaaagccgctttgcccgtcatgaagaggaggcgtaagtgaagttttttgccctcttcatttaccgcccggtggcgacgattttactgagcgttgccattaccctgtgcggcatactgggcttccgtatgctgccggtcgccccgctgccgcaggtcgattttccggtgattatcgtcagcgccagcctgcccggtgcgagtccagaaacaatggcgtcttccgttgccacgccgctggagcgcagtcttgggcgcattgccggagtcagtgaaatgacctccagcagtagcctcggcagcacgcgtattattttgcagtttgattttgaccgggatatcaacggcgcagcgcgtgatgtgcaggcggcgatcaacgctgcacaaagtttgctgcccagtgggatgcccagccgcccgacctatcgcaaagcgaacccgagcgatgcgccaattatgatcctcacgctgacgtccgatacttatagccagggtgaactgtacgatttcgccagcacgcagctggctccgacgattagccaaatcgacggtgttggtgatgtcgatgtcggaggcagcagtctgcccgccgtacgcgtcgggctgaatccgcaggcgctgtttaatcagggcgtgagcctggacgacgtacgcaccgccgtcagcaatgccaacgtgcgtaaaccgcagggcgcgctggaagatggcactcaccgctggcagatccagaccaatgatgagctaaaaaccgccgctgaatatcagccgttgattattcactacaacaacggcggcgcggttcgtctgggcgatgtggcgacggtgaccgacagtgtgcaggatgtgcgcaacgccgggatgaccaacgccaaaccggctattttactgatgatccgcaaactgccggaagccaatattatccagacggttgacagcatccgggcaaaattaccggagttgcaggaaaccattccggcggcgattgatctgcaaattgcccaggatcgctcccccaccattcgcgccagcctggaagaagtcgagcaaacgctgattatcagcgtggcgctggtgattctggtggtgtttttattcctgcgcagcggtcgcgccactattattcccgccgttagcgtgccggttagcctgattggtacgtttgcggcgatgtacctgtgcggattcagtctcaataaccttagcttaatggcgctcaccatcgctactggtttcgtggtggatgacgccatcgtggtgctggaaaacattgcacgtcatctggaagcgggaatgaaaccgttgcaagccgcactgcaaggtactcgcgaagtcggttttacggtgctgagcatgagtctgagtctggtggcggtgttcctgccgctgctgttgatgggcggattgccgggccgactgttacgcgaatttgccgtgacgctttctgtcgccattggtataagcttgctggtttctctgacattaacgccaatgatgtgtggctggatgctgaaagccagcaagccgcgcgagcaaaagcgactgcgtggttttggtcgcatgttggtagccctgcaacaaggctacggcaagagtctaaaatgggtgctcaatcatacccgtctggtgggcgtggtgctgcttggcaccattgcgctgaatatctggctgtatatcagcatcccgaaaaccttcttcccggagcaggacactggcgtgttgatgggcgggattcaggcggatcagagtattagctttcaggcgatgcgcggtaagttgcaggatttcatgaaaattatccgtgacgatccggcagtggataatgtcaccggctttacaggcggtagccgagtgaacagcgggatgatgtttatcaccctcaagccacgcgacgaacgcagcgaaacggcgcagcaaattatcgaccgtctgcgcgtaaaactggcgaaagaaccgggggcgaatctgttcctgatggcggtacaggatattcgcgttggtgggcgtcagagcaacgccagctaccagtacacgttgttatccgacgacctggcggcactgcgagaatgggagccgaaaatccgcaaaaaactggcgacgttgccggaactggcggacgtgaactccgatcagcaggataacggcgcggagatgaatctggtttacgaccgcgacaccatggcacggctgggaatcgacgtacaagccgccaacagtctgttaaataacgccttcggtcagcggcaaatcagcaccatttaccagccgatgaaccagtataaagtggtgatggaagtggatccgcgctatacccaggacatcagtgcgctggaaaaaatgttcgttatcaataacgaaggcaaagcgatcccgctgagctatttcgctaaatggcaaccggcgaatgccccactaagcgtgaatcatcagggattaagcgcggccagcaccattagctttaacctgccgaccggaaaaagcctcagcgacgccagtgcggcgatcgatcgcgcaatgacccagcttggtgtgcctagcacggtgcgcggcagttttgccggcacggcgcaggtgttccaggagacgatgaacagccaggtgatcctgattatcgccgccatcgccacggtgtatatcgtgctgggtatcctttacgagagttacgtacatccgctgacgattctctccaccctgcccagcgcgggcgttggagcgctgttggcgctggagctgttcaatgccccgttcagcctaatcgccctgatagggatcatgctattaatcggcatcgtgaagaaaaacgccattatgatggtcgattttgcgcttgaagcccaacggcacggtaacctgacgccgcaggaagctattttccaggcctgtctgctgcgttttcgcccgattatgatgactaccctggcggcgctgtttggtgcgctgccgctggtattgagcggcggcgacggcagcgagctgcggcaacccctggggatcaccattgtcggcggactggtaatgagccagctccttacgctgtataccacgccggtggtgtatctctttttcgaccgtctgcggctgcgttttagccgtaaacctaaacaaacggtaaccgagtaaatgacagatcttcccgacagcacccgttggcaattgtggattgtggctttcggcttctttatgcagagcctggacaccaccatcgtaaacaccgcccttcccagtatggcgcaaagcctcggggaaagtccgttgcatatgcacatggtcattgtctcttatgtgctgaccgtggcggtgatgctgcccgccagcggctggctggcggacaaagtcggcgtgcgcaatattttctttaccgccatcgtgctgtttactctcggtagtctgttttgcgcgctttccggcacgctgaacgaactgttgctggcacgcgcgttacagggcgttggcggcgcgatgatggtgccggtcggcagattgacggtgatgaaaatcgtaccgcgcgagcaatatatggcggcgatgacctttgtcacgttacccggtcaggtcggtccgctgctcggtccggcgctcggcggtctgctggtggagtacgcaagctggcactggatctttttgatcaacattccggtggggattatcggtgcgatcgccacattgctgttaatgccgaactacaccatgcagacgcggcgctttgatctctccggatttttattgctggcggttggcatggcggtattaaccctggcgctggacggcagtaaaggtacaggtttaagcccgctgacgattgcaggcctggtcgcagttggcgtggtggcactggtgctttatctgctgcacgccagaaataacaaccgtgccctgttcagtctgaaactgttccgtactcgtacctttagcctgggcctggcggggagctttgccggacgtattggcagtggcatgttgccctttatgacaccggttttcctgcaaattggcctcggtttcagcccgtttcatgccggactgatgatgatcccgatggtgcttggcagcatgggaatgaagcgaattgtggtacaggtggtgaatcgctttggttatcgtcgggtactggtagcgaccacgctgggtctgagcctggtcaccctgttgtttatgactaccgccctgctgggctggtactacgttttgccgttcgtcctgtttttacaagggatggtcaacagcacgcgtttctcctccatgaacaccctgacgctgaaagatctcccggacaatctggcgagcagcggcaacagcctgctgagcatgattatgcaattgagcatgagtatcggcgtcactatcgccgggctgttgctgggactttttggtagtcagcatgtcagcgtcgacagcggcaccacacaaaccgtctttatgtacacctggcttagcatggcgttgatcatcgcccttccggcgttcatctttgccagagtgccgaacgatacgcatcaaaatgtagctattagccggcgaaaaaggagcgcgcaatgaagttctggcgacccggtattaccggcaaactgtttctggcgattttcgccacctgcattgtcttgctgatcagtatgcactgggcggtgcgtatcagttttgagcgtggctttattgattacatcaagcatggtaatgaacagcgattacaactgttaagtgatgcgcttggcgagcagtatgcgcagcatggcaactggcgcttcctgcgcaacaatgatcgctttgtctttcagatcctgcgtagttttgaacacgataatagcgaagataaacccggcccgggtatgccaccgcacggctggcgtacccagttctgggtggttgatcaaaacaacaaagtgctggttggtccgcgagcgccgattccacctgacggtacacggcgacccattctggtcaacggtgcggaagttggcgcggtgatcgcctcccccgttgagcggttaacgcgcaatactgatatcaatttcgataaacaacagcggcaaaccagctggttgattgtcgccctggcaacgttactcgcggcacttgccacttttctgctggcgcgcggtttactggcaccggtaaaacgacttgtcgatggcacgcacaaactggcggcgggcgatttcactacccgcgtaacgcccaccagtgaagatgaactgggcaaactggcgcaagacttcaaccagcttgccagcacactggagaaaaaccagcaaatgcggcgcgattttatggccgatatttctcacgaactgcgtacgccattagcggtgctgcgcggtgaactggaagccattcaggatggcgtgcgtaaattcacgccggagacggtggcgtctttacaggcggaggtcggtacactgaccaaactggttgacgatctccatcagttgagcatgtctgatgaaggcgctctcgcctatcaaaaagcaccggtagatttgatcccactgctggaagtggcgggcggcgcatttcgcgaacgattcgccagtcgtggcctgaaactgcaattttccctgccagacagtattaccgtatttggcgatcgcgaccgtttaatgcagttattcaataacttactggaaaacagcctgcgctacactgacagcggcggcagcctgcaaatctctgccgggcagcgcgacaaaacggtgcgcctgacctttgccgacagtgcgccaggtgtcagtgacgatcagctacaaaaattgtttgaacgtttttatcgcaccgaaggttcccgcaaccgtgccagcggcggttccgggctggggctggcgatttgcctgaacattgttgaagcacataatggtcgcattattgctgcccatagcccttttggcggggtaagcattacagtagagttaccgctggaacgggatttacagagagaagtatgaccgagttaccaatcgacgaaaacacaccgcgtattttgatcgtggaagatgaaccgaagctggggcagttgctcattgattatctgcgtgctgcgagctatgcgccgacgcttatcagccacggcgatcaggtactgccgtatgtgcgccagacaccaccggatctgatcctgttagatctgatgctccctggcaccgatggcctgacgctgtgccgggaaattcgtcgtttttctgacattccgatcgtgatggtgacggcaaaaatcgaagagatcgatcgcctgctggggctggagattggcgcagatgattatatctgtaagccgtacagcccacgggaagtggtagcgcgcgtcaaaaccattttgcgccgttgcaaaccgcagcgcgagttgcagcaacaggatgctgaaagcccgttgattatcgacgaaggtcgttttcaggctagttggcgcggtaaaatgcttgacctgacgcctgcggaatttcgtctgctgaaaacgctctctcacgaaccaggaaaagtgttctcccgcgagcaattgctcaatcatctttatgacgactaccgcgtagtaaccgaccgcaccatcgacagccacattaaaaacctgcgccgcaagctggaatctctcgacgccgaacagagttttatccgcgccgtttatggcgtcggttaccgctgggaagccgacgcctgccgcatcgtttaattttagcgacattattttgttagccggagatggcgttcagaccagatccggcaacattatcccacgcatggtcagcaaactgacattatctctccgccctggcaggcatcagaaaatcgctcatactttaatcggtaaacagcacctttagaatcctgtcgtttgttttcgatttcaaaatataatgaaattatttgtttttaaatatcgagataacgatcacaaaaacgacaatatgaaaattattcgaggagtgaaaggcaaaaaaacggcctcccgatagggaagccgtagcaaagtgcgcgtgtttttatgccggatgcggtgtaaacatacgtggcagtgctatgtaggcatgataagacgcttcagcgtcgcatcaggcataggttgccggatgcagcgtaaacgccttatccgtcctacggggtggtgttgttcgtataaggcgtatcaggcgatagtaattttgctatcgagataaacgtcctgcacggcgttaatcagtttcacgccgtcagccatgcttttcttgaacgctttacgtccaagaatcagccccattccgcctgcgcgtttgttgataaccgcagtacgcactgcatcgctgaggtcagtttcaccgcccgcagcaccgccggagtttatcaacccagcccgacccatatagcagttagctaactgataacgcaccagatcaatcgggttttcgctggtcaatttgctgtaaacacgatcgtcggtgtaaccgtaattaattgctttatagccgccgttattttccgccattttttgtttgacgatatctgcaccgatggttgccgccagatggtttgcctgaccggtcaggtcggcggaaacatggtaatcaacgccatctttcttaaaggcggagttacgcaaataggcccacagcactgtcaccatacccagctcgtgcgcacgttcaaaagccgcagaaatttcttcaatctggcgacgactctcttcgctgccaaaatagatagtcgcaccaaccgcaaccgcgcccatgttgaacgcctgctccacgctggcatacagcgtttgatcgtaggtattcgggtaacttagcgtctcgttgtgattaagtttgacgaggaatggaatgcgatgcgcataacgccggcttacgctcgccagcacgccgtaagtactcgccacacagttacagcccgcttcgatcgccagttcaacaatgtttttcgggtcaaagtagagcgggttagcagcaaaactagctccggcagagtgctcaacgccctggtcaaccggcagaatagaaagatatcctgtgccagccagacgcccggtgttgtacaacgtctgcatattacgtaacaccgctggcgggcgattattgtcaatcattacgcggtctacgtagtcatgtccggggagataaagctggtcagaaggaattgtcatacaacggtgctgtaaaaggttgtcggcgtctttgccaagcaactgcgcaatatctgtcattactatgctcccgtaaattccgattggatatcggctatggattgtcctggcccgccttttgcgggcaatcataatcctggtcgttacgggcgagtttttccatcttttggatgttttttcagcgttttctgttggctcgattcatcagaaaaaatgttagcgcggtcaagttttcaccgcaaaggtatttaaaaggtattattaagtggtattgtcatcgcgtaccttacattacctgtcatgaaggaattaaaagatgaaaacaacagcaaagctgagcttcatgatgtttgttgaatggtttatctggggcgcgtggtttgtgccattgtggttgtggttaagtaaaagcggttttagtgccggagaaattggctggagctatgcctgtaccgccattgcggcgatcctgagcccaattctggttggctccatcactgaccgctttttcagcgcgcaaaaagtgctggcggtattgatgttcgcaggcgcgctgctgatgtatttcgctgcgcaacagaccacttttgccgggttcttcccgttactgctggcctacagcctaacctatatgccgaccattgcgctgactaacagcatcgcttttgccaacgtgccggatgttgagcgtgatttcccgcgcattcgtgtgatgggcactatcggctggattgcctccggtctggcatgtggtttcttgccgcaaatactggggtatgccgatatcagtccgactaacatcccgctgctgattaccgccggaagttctgctctgctcggtgtgtttgcgtttttcctgcccgacacgccaccaaaaagcaccggcaaaatggatattaaagtcatgctcggcctggatgcgctgatcctgctgcgcgataaaaacttcctcgtctttttcttctgtagtttcctgtttgcgatgccactagcgttctattacatctttgccaacggttatctgaccgaagttggcatgaaaaacgccaccggctggatgacgctcggccagttctctgaaatcttctttatgctggcattgccgtttttcactaaacgctttggtatcaaaaaggtattattgcttggtctggtcaccgctgcgatccgctatggcttctttatttacggtagtgcggatgaatatttcacctacgcgttactgttcctcggtattttgcttcacggcgtaagttacgatttttactacgttaccgcttacatctatgtcgataaaaaagcccccgtgcatatgcgtaccgctgcgcaggggctgatcacgctctgctgccagggcttcggcagtttgctcggctatcgtcttggcggtgtgatgatggaaaagatgttcgcttatcaggaaccggtaaacggactgactttcaactggtccgggatgtggactttcggcgcggtgatgattgccattatcgccgtgctgttcatgatttttttccgcgaatccgacaacgaaattacggctatcaaggtcgatgatcgcgatattgcgttgacacaaggggaagttaaatgaaaacagaacgtattctcggtgctctttatgggcaggcgttaggggatgcgatggggatgccctccgagctttggccacgcagccgcgttaaagcacactttggctggattgaccgttttcttcctggaccaaaggagaataacgcggcctgttattttaaccgcgccgaattcaccgacgataccagcatggcgctgtgtctggcggatgcgttactggaacgtgaaggcaagatcgatccggatctgattgggcgtaatattctcgactgggcgctgcgtttcgacgcctttaacaaaaacgtactaggtccgaccagcaagattgcgcttaacgccattcgcgacggtaaacccgttgctgaactggaaaacaacggcgtgaccaacggcgcagcgatgcgcgtcagcccattaggttgtttgcttccggcgcgtgatgttgattcctttattgatgatgtagcgctggcgtccagcccgacccataaatccgatctggcggttgcaggcgcggtagtcatcgcatgggcgatttctcgtgccattgacggagaaagctggagtgcgattgttgattccctgcctagtattgcgcgacatgcacagcaaaaacgcatcactacgttcagcgccagtctggcggcgcggctggagattgcgctgaaaattgtgcgcaatgccgacggcaccgaatccgccagcgaacagctttaccaggtcgttggcgcaggtaccagcactattgagtccgttccgtgcgccattgcgctggttgaactggcacaaaccgacccgaatcgctgcgccgtcctgtgcgctaaccttggcggcgacacagacaccatcggtgctatggcgacggcaatttgcggcgcgttgcatggcgttaacgctatcgatcctgcgttaaaggcggaactggatgcggtaaatcagcttgatttcaaccgctatgccacagcgctggcgaaatatcgtcaacaacgggaggcggtatgagcggcgctcgattacacacgctgctgcctgaattaaccacgcgtcagagcgtgatggtcgtcggcgcggcggtcattgacgtgatcgccgacgcttatgccctcccctggcgtgggtgcgatatcgaactgaaacagcagagcgttaacgttggcggctgcgcactgaatattgccgtggcgttaaagcgcctcggcatcgaagcgggtaatgccttgccgctcggtcagggcgtgtgggcggagatgattcgcaaccggatggcaaaagagggcttaatcagcctgatcgataacgccgaaggtgataacggctggtgtctggcgctggttgagccggatggcgaacgcacttttatgagtttcagcggtgttgaaaatcagtggaatcgccagtggctggcgcgattaaccgttgcgcctggcagcctgctctatttttccggttatcaactggccagcccctgcggcgaattgttagtggaatggctggaagagctgcaagacgtgacgccgtttatcgattttggcccacgtattggcgatatcccggatgcattactggcgcggatcatggcctgtcgacctttagtgagcctcaatcgtcaagaggctgagattgccgccgaacgttttgctttatccgcagagataacaacacttggcaagcaatggcaggagaaatttgccgcgccgttgatcgttcgtctcgataaagaaggcgcatggtatttcagcaacgacgcttctggctgcattccggcatttccaacgcaagttgtcgacaccattggggcgggcgacagtcatgccggtggcgtacttgccgggctggcctctggtctgccactggcggatgccgtattactgggcaatgcagtggcgagctgggttgtcgggcatcggggcggtgattgtgcgccaacgcgcgaggaactactcctcgcacacaaaaacgtataattactcctcgcacacaaaaacgtatagatcgctgcgacagtggctaatgctgtactcaataggccgttgctgttggtcaagcgccacttgcttgatcaccagcaccggtattttgctatctaactgaatatgactctgaaactcggcatccggcatccgggcgctaacgcgggaacgcgtacgttgtgggtaaatgtgctggctgcggaaatagtcataaagactaatcccgatggcatcaacatcatgaattaaatgcgccggaacccagctttcctcaatgcttaccgcttcttcatcgacatagcgaatacgcttaagcaaaaagacatcacttcctgcttcgaccgccagctgctgcgcgacttcttcgggacatttcacgacacgcttgttaacccatagcgtatcgggctttttcccgcgcaataccacctgctgagaaaaacctcgcgcttctttcaagctgtattcgaagatgttgttgatctgcgtgccgtaaccgcggctacgcgtcaccacaccctcttcttccagcgcctgcatcgccttgcgcaccgtaatgcggctaacgccggttaactgacttaaatcacgttcaccgggcaaaatattgccatgctccagcaccccgctgcgcacggcattttttaccgtttcggcaaacttaatataaagcggcgtgttatccgccgctaaaatacgctcgttcagttgggcaatcagctgggtatgcgcttgttccatttgtctttttcctgccggggagtctggtgggagtatatcactgcttcttatttaaggcgtttctttaatcccatcaacgaatgcctgcaactcctccaccgtgccattaaatacattaaaatccaccggaccattgatgccatctacctgtccacggtcggaatgctgccagaagcgccaggccattccgtcattgtccggacgacgttgatagtagtgagccacccaccacggatattcattgaaatagcccgccagattggtgtgataaaaaacggctccactgtaaataatcggctttttccccgtacttttttcgaccatttttagccactgacttacccgcttgcgtaattcttttgcgcttaattttccccgttcttctacgtccagcacggcagggaaatcgccttgactgaaatccaccgtttgcagaaataatctcgcctgaacactagcggatacgctcggggagaaataatgatacgccccacgcagcaggccattttcgcggcttagttgccagttacggctaaaataggggtccaccagcttttcgccttccgtcgccttaataaaagcaaactgtaagcggataccattgtcgcgcatttttgccacccgctgccagtcgatccgctcctgccagcggctaacatctattccgtgaatggtgtaactggcaggaatgcgaatagcgaaagatttaaccgggcgataaccgtagaagtggatgtagtctgtaatctgaactgctgtgctatagaaaaaattcaccgtctgacgcggataaattgcaacgatggaaattagcccaagagcgcataatagagaggtgagtttttttcgactggtaattcttagctgcattggtttcatccctgaatgtcagtgccaaaggctgacaataaccaaagcagctatagtacggcgctcaccaccaggcgtggaagtggtgaaccggaccaataccgtgaccaacttccagcgtgtcggcctgggctaacgcgctactaagccagctttttgcctcctgtacggtgtcagcccagtttgtatggcgcgggcgtagtgcagccaacgccgcagagagtgtacaaccagtgccgtgggtgtttttggtcataatgcgcggtgcggtaaaccgttgttcaccctcgcgggtaaacagccagtccgggctttgctcatcatccagatgaccacctttcattagcactgcgccacagcccatcgccaacaggcttcgcccttgttccagcatttcctgttcggtgcgcgcgtgtggcgcgtcgagcaaggcggcagcttcgggcaagtttggcgttattaaactaacctgtggcaataatcgactgcgcagcgtagcaaccgcgctaggactaagcagcgggtcgccgctttttgccagcataacggtgtcgagtaccacgttttggatctgataacgttgcaaccgttctgccaccgcttcaacaatatcggtttccgccagcataccgattttagtggtatcgattcgcacatcgctgaacacgctatcgagctgggcggcgacaaaatcaggctcaatgcgatacacgctctgtacgccacgggtattttgcgccaccagtgcagtaataacactgcaaccataagcgccaagtgcgctgaaggttttaagatcggcctgaatccccgcaccaccactcggatcagtaccggcaatcgtcagagcgttaattcgtttcatgcctgcacctcctgcgtcaattgccagagcgcatcaaggaaatgtggaacaaaactgcctggcccctcgcttctggcgactgcgcgttctccggcttgtttcatccagtgacaggcagatgcgacattttccagcgtatcgcctggtaacgcacagcaggcagcgacaaccgcgcttaatgcacagccagttcctaccactttggtcattaacggatcaccaccgtgaataccaatgatacgatgtccatcggtaacataatccatctcgccagtgaccacgacgattgcgccagtttcccgtgccagtgtttgtgcagcgggtatcgcgttagctgcggcgtcagtggtatccactccccgtccgccattagcaatgccagctaatgccatgatttcgctagcattaccacgtatcgctgccggtttaaaagataaaagttcatgacaaaaatggcggcgataatcgagcgcacccaccgctactggatcaagcgtccagggtgtttgagagctttttgcttgctcaacggcagcacgcatcgcctgagcgcgtggctgcgtcagtgtgccaacgttaatcaacaaggcactggcgatagccgcaaactgactggcctcttcggtttcgataaccatcgctgggcttgcaccgagcgccagcaaggtattggcggtaaaggtttgcaccacatcattggtcatgcagtgcacaagaggggaatgttggtgaaaaaggtgtaacgcgtgcgcagattgcgcactacccagcaggtcgacttgcatagtttgctcctgccataacgtgaagaagcaatgacctggtggtccgtgacttccctacgctggcattatccagatcaggtgatacgggtatttctcagccttcacgcagaagggcaccccgagtcgtttggttgcgatgataaatcgcagaggaggatggtaatgtccagcgcacgcgttgtaaacgaggaaaaacggcagttttacaatcgcgttaataaattatttgatataactatccagcaccttcagaacgacatccagatcttcttcacgttttagctcatccccctggtgaacgatgtgttccgtcagatgacctttaatcacttcccgcatcagaccgtttaccgcgccacggatagcagcaatctgttgtaaaactgcagcgcattcgtgcggctcgtcgagcattttcttgagcgccacgacctggccctgaatcttactggcacgcgctttcagtttctgtttatcacggattgtatgagacatggcaacacctggttaacaagaatatgaaaaatcatagcactattaatctactggggggtagtatcaggtactgggggggagtagaatcagattgccgaattaatactaagaattattatcatgaccgaatttacaactcttcttcagcaaggaaacgcctggttcttcatccccagcgccatcttacttggtgcgcttcatggcctggaaccagggcacagtaaaacgatgatggcggcgtttatcatcgccatcaaaggcaccattaaacaagcggtgatgctcggactggcagcaactattagccataccgcagtggtctggttaattgcctttggcgggatggtgatcagcaagcgctttactgctcaaagtgcagaaccgtggctccagctgatttccgcagtgatcattattagcaccgcgttctggatgttctggcgtacctggcgcggcgaacgcaactggctggagaatatgcacgggcatgattatgagcatcatcatcacgatcacgaacatcaccacgaccatggacatcatcaccatcacgaacatggcgagtatcaggatgcccatgcacgagcccatgccaatgacattaaacgacgctttgatggtagagaggtcaccaactggcaaattttgttatttggcttaaccggtggccttatcccctgcccggcagcaattaccgtgctgttgatatgcattcagttgaaagccctgacactgggcgcaacactggtcgtcagtttcagcattggcctggcgttaacgcttgtcaccgtaggcgttggcgcagcaatcagcgttcagcaggtcgcaaaacgctggagcggatttaacactctcgctaaacgcgccccctatttttccagtctgttgattggcttagtcggtgtgtatatgggcgtacatggcttcatgggcataatgcgataactcaatcctttaggcttgcatgttatcttcagcccaggatgattcttaaatcagctatttccgctgactctctgctcgctaaggatgcttttagggcatcctttcatttacactttttacgaaatcatgggatcactaacaaaatatcgcttgtcagttatattgtatggcaggaaagatatgcgactgatattacagatccccaaagtggagagtttatgaccattaaaaataagatgttgctgggtgcgcttttgctggttaccagtgccgcctgggccgcaccagccaccgcgggtagcaccaataccagcggaatttctaagtatgagttaagtagtttcattgctgactttaagcatttcaaaccaggggacaccgtaccagaaatgtaccgtaccgatgagtacaacattaagcagtggcagttgcgtaacctgcccgcgcctgatgccgggacgcactggacctatatgggtggcgcgtacgtgttgatcagcgacaccgacggtaaaatcattaaagcctacgacggtgagattttttatcatcgctaaaaaaagccccctcatcatgagggggaaatgcagacaccttgttattttttattattagccacttgctcgtcttgcttgttattagtcgtatttcacgttgattaatgcggttgcctccagtgcgccagatttaactttgtttgtatcgtagacgtagtaactggctgttatcggaatactaaccgttgtatctgtaagtttactcttcgccgcaacttcctttaaatttgtatatcctttactgctgttagtgatatttaaaagtgtgactgggctaccattactttcaagaataaatcctacgccattatcttccgcacctttcagtattgtgttgctgttggttaacaagtcagaactacttaaatacacctgcattttccgacttgtttgattttgttgacctaataaatttttacaacgcagaataatatccccttgtttactatttattgttgctttgttacctgtggctggtaattgactaacgggaatactgtctaaagtaattaataaatcgtccggtttgcaggttgtggttatcgggttgtaactcaatgtcagattaaaggaatagacacctgcattttgtgccaatgcatttctgtagctatttacacatgcatcccaactcttgccacctaataaacacagtagaaattgtactgcggcactcccgcgtgtgctactactagcactggataatgtcgcaacaccattaatcatcacactaccgccgccccccgcagaaacattcacttttgcattactggccgcaggtgtcaccgtaacactataaccactggtgaaactggtctgattattactcaacgtgatgttgtttttattggtccattcaaaatgtaaatttaattttatggtatcgttataaagtccaacaataatatcgctcgggctcataggggtgatagtatttgtacttacgcaactgctatcattaaaattatgctcatatgtcgccatttgtgtttgagtaagtgcaaaatccccctgaacaaccaagttgtgctgaacagataactcactataacatgccgcatagctcacaggcataaccatcatcattaatataaatagcattatgcgaatttccatagaaccacctgactattactggcaaatataatttctactttcatcaatctctttaccgaaggtgattgtgcaactaagtccttgttgcttatcaattgccacattaacgcttggcggtacttcattggtgcgaataaataactgacttccctggccgacaacgccaatattatgaccatggatatcattgacttcataaccaaacgttaaactttgcccatctgctcttaacgcttttataaaccatggcttgcgctgatcggtatcaaaattaaccagtacaaccgcgccgcgataaggggcggcaattttccggttgccacgtaattctgcttcgctatcgctttggctcacatccagcatcaggtgattttcccgataaggtgtcattccgtcgtatatcaccactccattacggtttgttgtgcgatatttttgcccattgacataagcatctttaattcctggcgcattcatcacagcaaacgtttcggaaagacggttcgccagattaacgccaccgctccaggcgacaatgcccccactaacactggctccagcctgtcgataagtactgctctgactataactgccattcactgtcgcaaccggcgcgttccaggtcaaattcgccccagctgtcgtttcatttccctgatgttgatgactcaggttgacaccataattgaactgatcccgactccctactgttccacttaatcccgtattattactggcaaacccctgatcatcaaacgtcgtactgttagacatatatatttgccgacgaggcgtgctaacgtcatcaccccaatcaaagggaatgcttataaaaatattaaaacgtttctcttcatgatgattctcgtcataagcctggcttgccgcgagggtatagcttatccgtcgcaggttgttggaataactcaactgataatccttactactgccgctacgcccccagtaatctcgccataacgtacttaaactcacagacccccaaccttctggcaaactctggctcatattggcggaaaagctatttttgcggccaaaatcgttctggtaataatcggcaatgtcatagacatcgttttcatcacggcgataattatctttattgtttgcccaaacgtgatcgttaaatgtccggtaatcacggctgctataacgccaggccgccagaccaaaacgcgtgctcgtttggctcacaaatttgttgtaggcaatttgataactttgcccgtcaaacacatcgccgttgtcttgtttactatggctcttagtggcatcgacggaaatggcaccaatgcgtgtattccagccagcccccaaagtaaacgcgtaataattattcgcgaccatgctgccaccatacagcgtcaataaattattaaaaccatactgataacccgcctggacaaaatcactttgtttgctcgccccttcaatatggctacgacccgccgctaaatcatatttgctcacgccgggttgcagcatatttggcaccgctgcataaggcaccagataggtggttacgctgccgtccgcctctttcacgctgacatcaagatctgctccaccaccggccaactgcaaatctgtaatcgcgaacgggccaggaggaacctctttctgataaaccacaaaaccattctgttcaatagttaccagcgcgttactctgagcaatcccctgcacccgtggcgtaaaattttgtttgctgttaggcaacatctgcatatcacgaaacaaccgcacacctctgaagcgaacagaatcaaaaatatcgctacttgtgtacatatcacccacgcgaagcgtgccgagaagttgggcaaatccacgttccagatacagggtattgcttttccacacccctggattgttatttgttttactgaaactggcatcagaatgcagttgccaccccagtaaatttaacccgctgttaaaacgtacatatgtactcttgttattaccgctcgctttatagtcgctgtaatactgactcagataataagaggtataaaacgcattaataccccgctcccagttttccggtggaacatagccactttccagttcttccacccaggcctgcgggacactgaaatcgagacgaaaaaccccgatatcccaggtatagctcccaccctgaacaagttgctcaaatgttaaacattgcttaccgctggcgaagttatcgctattaatgcctaaccgcttgataacttctctacttaaacatgtttcttgcgggttgtctttaacaataatctcatatttcccgcgccattgcttattgacataaatatcgatgtcatactgccccggtaagggttgattatcatcaagacgaatatttgcaacctgctggtctttcattccacctatcataaaatgggtatcaaaggtttcttcagctgcataagcttcaatgccgagcaataacgctacgattgcacttgcaagtggggtcattctcaacataggcagctcctgcaattaaattttgtcactaatatagttgccatggtcatcgataatggtcagatgccagttatttgcattattacttttgacattaacactctgactttctaagggggcaatcataatagtttcataattgactttgacattattagctttgacatcgctaatcgtcacccaattagcactgtcattttttatcaccaaaccattgccactgcgatttaccagcaattttttaaatgtcgctttatttaccggagcaatacccgctggccggtaaaacaacttaattctgttttgcatcgcaaacttcagtgcattcttaccttcttgctctggactatttggtggaatatccagaacattcagataaaaaatgctttctttattagtgggcagtttattcggcataattttgatttttacttgctgcccggaatttgcccctatttttgccactggtggcgttaacatgaaaggaacctgaattttttctggtggtaaactcgtatcgccatcatcaatccacgcctgcagcaggctagaacggtttccctggttcatcaactgcaccatcacttctttattttctgccgggtaaataatgcgcgtcccgtagataacaattccggcatgtgcaggaaggaccatagaaaaaatgagtaaagataataatcctttcattttaatgcctcttaaattaaaaggccgccatgggatagcggccatgtttattacctggagaaacttacaattttatttattaatcctgcgccacacgcataaccagagaagataacacatcaccactttgcacactgttatctgtcagtttcaggtattttgctttaaacggaatagcatattgaccttccgctgttttataactctcaatgttaaaaggtgcagaaacatccaggacatcgctgttatcacctaaatagagatagtaacccacggtatcgttgctactggctatcgccttatcgttaccggttattttatcgttggtaatcaagctgagttttacaccagcaacttctttcgggcagctaatttttaacatgctgctggttacaccgactgcatcatcataggtagaatatttagctttaccttcaaagacactggttggtacagtcggcatattaatacttacactatcaccacccgcttcgaatttacacggagattctgcaatattccccttaatagttaatgttccggtatcaacgtctgcagcaaatactccagcgctcataaaaaaagaagaaaagacagcggcagcaataatactacgtttcataatatgttccttaataaaatttatttttggttgttaagagtctgtatctcttggaaacaaatttctcacatcaaaaaagttgccgcaatgtaaacacattgttttattgatttaaaacaaattaaccattgcaatataaatacaaaaaatatttaagagtattaactatttatcgcatctatcaattaatgtagatttatgtaaatggtattgttgatatcaataaaaaagccgaaatcatttatataaatgatttcggctttctaaatgcaattaaaatcaggttgccaaattaatcgtagcgatttaacacgattcgacgtttgctatcgctacctgcaacaaccacttctgtcgttacacctttgacggggctagaaaacagatgacgggtgtcaacattatacgttaactgaccacaatgctgttgaggttgaccattaaccatagccatactgcatgttgggggactgatcctgccattaatcgctaatgtggcagtctcactagagaatgcgggagaagccaatccataggcaagaaaaataattccactcagccaatacttattcattgaacgttatccctgtagtaaaggttatgcctggatagaatgagtgcataacaaactatagctgtacatccactacacagccacgaaggatgataatgaagcattgcctgtatgatcaatcgactttgtagagtttcggacgaaggtccgcagaatattcgcagtattaaataagtgttcattaatgcggcaaaaactaatacaccgcatcaatgtaacatctctgcggtgtatgaagaataaccagaatggttaataggcgttagaccgcgcggaaggaaatctcgcctggaatgacttcaccctgccagtagagctgagctgcaacgcggtcagccagctggcggtagatagcggtaaattcgctctccggacggctgataaccgttggcgtacctttatcgagatcctcacgtaaggagatgtgtaacggcatctgccccagcagctgtgtatggtatttttcagccagtttctctgcaccaccggtaccgaaaatcggttcatggtgaccacagttactgcaaatatgcacactcatgttctcgacaataccgagcaccggaacctcgactttctcgaacatcacaatgccttttttcgcatcgatcagcgcgatgtcctgcggggtggtgaccacgactgcaccggttactggaatgttttgcgccagcgtcaattgaatgtcaccggtgcctggcggcatatcaagcaccagatagtcgagatccggccacaaggtttcctgcaacatctgcattaacgccttgctcgccatcggtccacgccacaccatcgcattgtcgtcagtgaccagataaccaatactattggttgccaggccatgagacataatcggtgccatatgggtaccgtccgggctagttggacgctgattttctgcgcccaacattgttgggatacttgggccgtagatatcggcgtccagaatgccgactttcgccccttctgccgccagcgccagtgccaggtttaccgccgtggagcttttacccacgccgcctttaccggaactcaccgcgataatgttcttcacaccgttaattcccggctgattcttcacgcgtttcagagtggctatgttatggctcagtttccagtcgatagctttcgccccggtgatgcgcagcagttcggcgctacattgctcttttaactcttcgaacgcgctatgccagacaaacggcataaccagttccacatgcaacgtgtcgtccatccaggcgacatggtgcaacgctttcagcgtggtgaggttatgcttcagggttgggtgctgaaaattggccagtgtcccggcgaccattgcgcgcaaggcttctggacttttggcctgggattgttcgttcatcccgactccttttttgtatagataaaccatcagctgatagtttacctgaagaatatagagaagtacttacttaacattttcccatttggtactatctaaccccttttcactattaagaagtaatgcctactatgactcaagtcgcgaagaaaattctggtgacgtgcgcactgccgtacgctaacggcagtatccacctcggccatatgctggagcacatccaggctgatgtctgggtccgttaccagcgaatgcgcggccacgaggtcaacttcatctgcgccgacgatgcccacggtacaccgatcatgctgaaagctcagcagcttggtatcaccccggagcagatgattggcgaaatgagtcaggagcatcagactgatttcgcaggctttaacatcagctatgacaactatcacagcacgcacagcgaagagaaccgccagttgagtgaacttatctactctcgcctgaaagaaaacggttttattaaaaaccgcaccatctctcagctgtacgatccggaaaaaggcatgttcctgccggaccgttttgtgaaaggcacctgcccgaaatgtaaatccccggatcaatacggcgataactgcgaagtctgcggcgcgacctacagcccgactgaactgatcgagccgaaaagcgtggtttctggcgctacgccggtaatgcgtgattctgaacacttcttctttgatctgccctctttcagcgaaatgttgcaggcatggacccgcagcggtgcgttgcaggagcaggtggcaaataaaatgcaggagtggtttgaatctggcctgcaacagtgggatatctcccgcgacgccccttacttcggttttgaaattccgaacgcgccgggcaaatatttctacgtctggctggacgcaccgattggctacatgggttctttcaagaatctgtgcgacaagcgcggcgacagcgtaagcttcgatgaatactggaagaaagactccaccgccgagctgtaccacttcatcggtaaagatattgtttacttccacagcctgttctggcctgccatgctggaaggcagcaacttccgcaagccgtccaacctgtttgttcatggctatgtgacggtgaacggcgcaaagatgtccaagtctcgcggcacctttattaaagccagcacctggctgaatcattttgacgcagacagcctgcgttactactacactgcgaaactctctagccgcattgatgatatcgatctcaacctggaagatttcgttcagcgtgtgaatgccgatatcgttaacaaagtggttaacctggcctcccgtaatgcgggctttatcaacaagcgttttgacggcgtgctggcaagcgaactggctgacccgcagttgtacaaaaccttcactgatgccgctgaagtgattggtgaagcgtgggaaagccgtgaatttggtaaagccgtgcgcgaaatcatggcgctggctgatctggctaaccgctatgtcgatgaacaggctccgtgggtggtggcgaaacaggaaggccgcgatgccgacctgcaggcaatttgcagtatgggcatcaacctgttccgcgtgctgatgacttacctgaagccggtactgccgaaactgaccgagcgtgcagaagcattcctcaatacggaactgacctgggatggtatccagcaaccgctgctgggccacaaagtgaatccgttcaaggcgctgtataaccgcatcgatatgaggcaggttgaagcactggtggaagcctctaaagaagaagtaaaagccgctgccgcgccggtaactggcccgctggcagatgatccgattcaggaaaccatcacctttgacgacttcgctaaagttgacctgcgcgtggcgctgattgaaaacgcagagtttgttgaaggttctgacaaactgctgcgcctgacgctggatctcggcggtgaaaaacgcaatgtcttctccggtattcgttctgcttacccggatccgcaggcactgattggtcgtcacaccattatggtggctaacctggcaccacgtaaaatgcgcttcggtatctctgaaggcatggtgatggctgccggtcctggcgggaaagatattttcctgctaagcccggatgccggtgctaaaccgggtcatcaggtgaaataatcccccttcaaggcgctgcatcgacagcgccttttctttataaattcctaaagttgttttcttgcgattttgtctctctctaacccgcataaatactggtagcatctgcattcaactggataaaattacagggatgcagaatgagacactttatctatcaggacgaaaaatcacataaattcagggcagttgagcaacagggaaacgagttgcatatcagttggggaaaagttggcaccaaagggcaaagccagataaaaagtttttcagatgctgcggcagcggcaaaagcggagcttaagctgattgcggagaaggtgaagaaggggtatgtggagcaagcgaaggataattctttgcaaccttcccaaacggtaacgggctctctcaaggtagcggacttatccaccattattcaggaacaaccctctttcgtagcagaaacccgtgcgcctgacaaaaatacagatgctgttttaccgtggctggcgaaagatattgctgtcgtttttccgcccgaagttgtacacaccacgttaagtcatcgccgctttcccggagttcctgttcagcaagcagacaaattgccccaattacgtcgcttagcctgtagtgtgtcgcaacgggataataaaacagccacatttgacttcagcgcctgttctttagaatggcaaaacaccgtcgcccaggcgatcagtcagatcgacggcctgaaaacaacacagttaccatcaccagtaatggctgtactcacggcacttgaaatgaaatgcacaagatataaagtgcgtgaggatgttatggatcagatcgtccaggaaggcggtctggaatatgctactgatgtaataatacaccttcaacagattgatattgaatgggattatgcgaataatgtcattattattctgccgtctggcattgcacctagctacttggagcaatattccagatttgaatgacgcctacgtaaacatttatcactgacggaagagtctctctggcaaaaatgtgcacaaaaacttattgccgcaattccacatattccagaatggcggcaaccattaattgctttgttattacccgaaaaaccagaaattgcacatgaaattgcccagcgtctactggggcaaaaaaaattaccctcgcttgagtggttaaaaatagtggcgactgatgagcacattcttgcctcattagaaaaatatcacgaaccatatgccatttttgatgattactattgtggtgcgatatggtcagccaccgtattacaggagcaaggtgttgcagccctgccccgatttgctccctatgccgcaagtgactactgcgccgatgtgttgcgtcatatcaatcatccgttcgcattgacactgcttatacgtgtagccgggcaaactaaacgctgtcacgatcggatgacgaaagccattgctgcgttcccacatgcagcaatggcggcactgacggaacttcttgggcaaaaagaagagaacagttggcgcattatgctaatgacaatgcttatctcacaaccagcactggcagaacaggtcattccctggctctcgacacccgcagttgccgtactgaaatcatgccagcaacaactgacacagccctcaaaccatgccagcgccgatctactgccagccgtagtagtctcccctccctggctttcgaaaaagaaaaaatcgccgattccggtgctggatttagcgccattaggcattgagccaatctgttatctgacagaagaaatcagtaatcaacttttggcgaaatatatctggtattcaaaacacatcacggttagccatgaagaaagtactaccaacctgttggcaaggatgggttttcaacgacggatcgctggtacatatattaaagctcccgaagcggtagttgaggcatggctaaatgaagattattcaaccttactaagtgaatttaaggtgtttcattcacctaccgggcattattggcagttggggattttgacaacattgccgctggagaaagcagtaaaagcatggaatgcccttaccctatctccacataccgataccgaatactccatgttacattttggactcaaagggttacctgggttagtaaactcacttgcacgctatccacaagaagccttgcccatcacgaattacttcgcagcgagtgagctggctcctgccgtcgcccgtgccttcaacaaactgaaaacgctacgcgaaaacgcccgtagctggctgttgaaatacccggaacatgcccttaccggcctgctgcctgcggcgctcggcaaagccggtgaagcacaggataacgcccgcgctgccttgcgtatgcttaccgaaaacggtcatcagccattactgcaagaaatcgcccgacgttataaccagccggaagtaaccgatgcggtgaacgctctgcttgcgctcgatcccttagataatcacccgacaaaaatccccactcttccggccttttatcagccatcgctctggacgcgcccggtattaaaagcaaatgcccaatcactgccagatagcgccctcctccacctcggtgaaatgctccgcttccctcaggaagaggctctgtatccgggattattgcaggtgaaagacgtctgttccgccgactcactggcgggatttgcctgggatctgtttaccgcctggcagaccgctggcgcgccgtcgaaagagagttgggcgttcactgcgttaggcgttctcggtaacgatgacaccgcccgcaaactgacgccattaatacgcgcctggcctggtgaatcccagcataaacgcgccaccgttgggttggatattctcgctgctatcggtagtgatatcgcccttatgcagcttaacggcatcgcccagaaactgaaattcaaagcattacaggagcgggcaaaagaaaaaattgccgacattgccgagagccgcgaactcacggtggcggagcttgaagatcgggttagcaccggatctcggtctggatgataacggttcgctgctgctggattttggcccacggcagttcaccgtcagctttgatgaaaccttaaaaccgtttgtgcgtgatgtttccggcagccgcctgaaagacctgcccaaaccgaacaaaagcgatgatgaaacgcgggcgaacgatgcggttaaccgctacaaattgctgaaaaaagatgcgcgtaccatcgccgcccagcaggtagcaaggctggaatccgccatgtgcctgcgccgccgctggtcgctggaaaacttccagctcttcctggttgagcatccgctggttcgtcacttaacccgccgtctgatttggggcgtttatagcgccgaaaaccagctactggcttgctttcgcgtagcagaagataacagctccagcaccgctgacgatgatcttttcaccctgccggaaggcgatatctctatcggcactcctcacgttctggaaatatcaccaacggatgctgccgcctttggtcagctttttgccgactacgaactgctaccaccgttccgccagctcgaccgtaacagctacgccctgacagaagccgagcgcaatgccagtgaactgacccgctgggcaggcagaaaatgcccgagtggtcgggtcatggggctggcgaataaaggctggataaagggcgaaccacaggatggaggctggatcggatggatgatcaaacctttgggtcgctggtcgttaatcatggaaatcgatgaaggctttgcggtaggcatgtcgccagccgaactcagcgctgagcagctcttaagcaagctgtggctatgggaaggcaaagcagaaagatatggctgggggagtaattcaacacaggaagcgcagttctccgtaatcgatgccatcaccgccagcgagctaattaacgatattgaagccctgtttgaataaggaaagagcatggacaaggaattaccgtggctggcggataacgcccaactggaactgaaatataaaaaaggcaaaacgccgctcagtcatcgtcgctggccgggcgaaccagtgtccgttatcactggaagtctcatccagacattgggtgatgaattgctacaaaaagctgagaagaaaaaaaacattgtctggcgttatgagaattttagtctggagtggcagtccgccatcacgcaggccatcaacttgatcggcgaacacaaacccagtatcccggcccggacaatggcggcgctagcctgtatcgcgcaaaatgacagccaacagttgctcgacgaaatcgtccaacaagaggggctggaatatgcgactgaggtggtgattgcacgccagtttattgcgcggtgttatgagagtgatcctctggtagtgacattgcagtatcaggacgaggattatggctatggttatcgcagtgaaacctataacgaattcgatctccgactgcgtaagcatctctctctggcagaggaaagctgctggcagcgttgcgccgacaaactcattgccgcactaccaggaataaacaaagttcgccgcccttttattgcgctgatcctcccggaaaaaccagaaatagccaatgagttggtaggccttgaatgcccgcgaactcattttcattctaaggagtggttaaaagttgttgctaatgaccccacagcggtgagaaaactcgaacactactggagccaggatatatttagcgatcgagaagccagctacatgagccatgaaaaccacttcggctacgcggcctgcgccgcccttttgcgcgaacaaggactggcagccattccgcgcctcgcgatgtatgcccataaagaagattgcggcagtctgctggtacaaattaaccatccgcaagtcatccgcaccttgctactggtggctgataaaaacaaacccagcctgcaacgtgtagctaaataccataaaaacttcccccatgcgacgctcgccgcactggcagaactgctggcgttaacagaaccaccagcccgccctggttatccaatcatcgaagacaaaaagctgcctgcacagcaaaaagcacgcgatgaatactggcgtacgctgttacaaacgctgatggcaagccagccacaactggcagcagaagtgatgccgtggttaagtactcaaccccagagtgtgctgaagagttatttaagcgcaccgcccaaaccggttattgatggcaccgataacagcaatctgccagaaatcctcgttagtccaccgtggcgtagtaagaaaaaaatgacagctccacgtcttgatttggcaccgctcgaattaactccgcaagtttactggcaaccaggcgaacaagagaggcttgccgccactgagcctgcccgttatttcagcacggaatctcttgcgcaacgcatggaacaaaaaagtggacgagttgtattacaggaactgggttttggggatgatgtatggctgtttctgaattatatactccccggaaaactggatgctgcacgcaatagtctctttgttcagtggcattactaccaggggcgggttgaagagatcctgaatggctggaactccccggaagcacaattagcagaacaggcgctccgcagcggtcacatagaagcgttaattaacatatgggaaaatgacaactacagtcattatcgtccggaaaagagtgtctggaacctgtatttattggcacagttgccgcgtgagatggctttgaccttctggctgcgtatcaatgagaaaaagcatctgttcgcgggtgaggactattttctcagtatcctcggattggatgcgctaccaggtctgctgttggcttttagtcatcgtccaaaagaaacatttccgttaattttaaattttggcgcaacagaactggcgctgcctgttgcccacgtctggcgacgtttcgcggcgcagcgtgatctggctcgccagtggattttacaatggccggaacatacggctagtgcacttatccctcttgtctttaccaaacccagcgataatagcgaagccgcattacttgccctgcgtttactgtacgaacagggacatggcgaattgctacaaaccgtggcaaaccgctggcagcgtacagatgtatggtctgccctggagcagttgcttaaacagggtccaatggacatttacccggcacgcattccaaaagcccctgatttctggcatccgcaaatgtggtccaggccgcgccttatcactaataatcaaactgttaccaatgacgctctggaaattatcggcgaaatgctgcgctttacccaggggggacgtttttatagcgggctggaacaactgaaaacgttctgccagccacaaacgctggcagcttttgcctgggatctcttcactgcgtggcaacaagctggtgcccccgcaaaagacaactgggcatttctggcgttaagtctctttggtgacgaaagcacggcacgggatctgacgacacagatcctcgcctggccacaagaaggcaaatctgcccgtgctgtcagcggcctgaacatccttaccctgatgaataatgatatggcgctgatacagctgcatcatataagccaacgggctaaatcccgccccttacgtgataacgcggcggaatttcttcaggtggtcgcagaaaatcgcgggctaagccaggaagagctagcggacagattagtcccaaccctgggccttgatgatccgcaggcgttgagttttgattttggtccccggcagtttaccgttcgcttcgatgaaaatctcaacccggttatctttgatcagcaaaacgttcgccagaaaagcgttccccgtttgcgcgccgatgacgatcaactgaaagcgcccgaggcactggcccgactaaaagggctaaaaaaagatgctactcaggtgagcaaaaacctgctcccgcgtcttgaaacggccctacgtaccacccgacgctggagcctggcagattttcattctctgtttgttaatcatccctttacccgtctggttacccagcgattaatatggggggtttatccggcaaatgaaccgcgttgtttactcaaagcctttcgtgtggccgcagagggggagttctgcaatgcgcaagatgagccaattgacctgcctgcggacgctctgattggcattgcccacccgttagaaatgacagcagaaatgcgcagtgaatttgcacagctttttgccgattacgaaattatgccgccttttcgccagttgagccgccgcacggtgctgctcacacctgacgagagtaccagtaacagcctgactcgctgggaaggtaaatccgctaccgttgggcaacttatgggaatgcgatacaaaggctgggagagtggctatgaggacgcatttgtctataacctgggtgagtaccggctggtccttaagtttagtcccggttttaaccactacaatgttgatagcaaagcgctaatgagcttccgttctcttcgagtgtaccgtgacaataaatccgtcacttttgccgaacttgatgtgtttgatttgagtgaggcgttaagcgcacctgacgtcattttccattaaaacacagcgggcagtgatgcaactgcccgttatcaacacgacttaccagcggggaaagcgatgatcgtgcaaaaagagctggttgctatttacgattatgaggtccctgtacctgaagatccgttttccttcagacttgagatccataaatgctctgaattatttacaggttccgtctatcgactggagcgattccggctacgtccaacatttcatcaacgtgatcgagaagatgctgacccgctaataaatgatgcgttgatttatataagagatgagtgtattgatgagcggaaattacgaggtgaaagtcctgaaactgtaatagcaatttttaatcgtgaactacagaatatattcaaccaagaaatagaataatatactctaaataattcaaattggtccgatccggcgcaacgtcccaatggcctggattataaatctcattatcttaattgcaacggggtccagccgtggttataattcgttcgttggaacacgatgttgcacaggctgtggtgttaggcctgaaaatagtaaataaaagaacctgcctcaccagcaggtttttttatttactgtgatctgctttccagatatttttcgctcaaacaactaatgcgccaaacatttattgcgcgtaaaatatcgtttatttcattaatacatttcagggatgaatatatgagtccgcagaataatcatctgcagcgtccgcctgctgctgtgttatacgccgatgaactggcaaaattaaaacaaaatgataacgcaccttgcccgcccggttggcagttaagtttgcctgcggcccgtgcttttatccttggcgacgaagcgcaaaatatcagccgtaaagtggtgattagcccctccgctgtcgaacgtatgttagtcactcttgctaccggccgcggtttgatgttggtgggggaaccgggtaccgcaaaatctcttctttctgaattactggcaaccgctattagcggcgatgccgggttaaccatccagggcggggcatctaccaccgaagatcaaatcaagtatggctggaactacgccctgcttatcaatcatggtccgagtacggaagcgctggtccctgccccgctttatcagggaatgcgcgacggcaaaatcgtccgtttcgaagagataacgcgtacaccgctggaagtgcaggactgtctgttaggtatgctttctgacagggtgatgacggggccggaactcactggtgaagccagtcagctctatgcgcgagaaggctttaatattattgccactgccaatacccgcgatcgcggcgtcaatgaaatgagtgctgcgctaaagcgtcgcttcgattttgaaacggtttttccgattatggatttcgcccaggagttggaactggtcgccagtgctagcgcgcgtttgctggcccatagcggtattccgcataaagtgcctgacgcggtactggaattactggtccgcaccttccgcgatctgcgtgccaacggcgaaaagaaaacgagtatggatacactgacagcgattatgtccaccgctgaagccgtgaacgtggcccatgctgtgggcgtccgcgcctggtttttagcgaatcgcgcgggggagcctgccgacctggtggaatgtattgccggaaccatcgtcaaagataacgaagaagatcgcgcgcgtctgcgccgttacttcgaacagcgtgtcgccacacataaagaagctcactggcaggcttattatcaagcccgccaccgcctgccgtgaggaaagatgcatgagcgagccgttaattgtcggcatccggcatcatagtccggcctgcgcccggctggtgaaaagcttaatcgaaagccagcggccacgatacgtgttgattgaaggcccggctgattttaatgaccgggtagacgaactgtttttagcccaccagcttccggtagctatttacagttattgccagtatcaggacggtgcagcccccgggcgtggtgcctggacgccatttgctgaatttagcccggagtggcaggcgctacaagccgcacgtcgcattcaggcacaaacttacttcatcgatttgccttgctgggcgcagagtgaagaagaggacgatagccctgatacgcaagatgaaagccaggccttactgctgcgtgccacccgcatggataacagcgataccctgtgggatcacttgttcgaagatgaaagccagcaaactgcattaccctctgcgctggcgcactattttgcccaactgcggggcgacgcctccggcgatgcgctcaatcgtcagcgcgaagcctttatggcccgctggattggatgggcgatgcagcaaaataatggcgacgtgttagttgtctgcggtggctggcacgctccggcactggcaaagatgtggcgcgaatgccctcagaaaattaacaagccagaattgcccagcctggcagatgccgttacaggttgttatctcacaccctacagtgaaaagcgccttgatgtgctggcaggataccttagtggaatgcctgccccggtatggcaaaactggtgctggcagtggggcttgcagaaggccggtgaacaactgctaaaaactatccttacccgtttgcgccagcacaaattgcccgcttctaccgcggatatggctgccgctcatctgcatgcgatggcgctggcacagttgcgcggtcatacactaccgttacgcactgactggctggatgccatagcaggcagcctgattaaagaagccctgaacgcgccgttgccgtggagctatcgcggcgttattcatcccgataccgatccgattctgctaacgttgatagacacattagcgggtgacggattcggtaaacttgccccttctacgccacaaccgcctctgccaaaagatgtcacctgcgaactggaacgtaccgcaatctcccttccggcggagcttaccttaaatcgctttacccccgatgggctggcgcaaagtcaggtgttacatcggctggcaatactggagatccctgggattgtacgccagcagggaagtacactgacacttgcaggcaacggtgaagaacgctggaaattaacccgcccgcttagccagcatgcggcattgattgaggccgcctgttttggtgccacactccaggaagccgcacgcaataaattagaagccgatatgctggacgcgggcggaatcggcagtatcaccacatgtcttagccaggcggcgttagcgggtctggcgtccttcagtcaacaattactggagcaactcacactattaatcgcccaggaaaatcaatttgccgaaatgggccaggcgctggaagtgctttatgccttatggcggctggatgaaattagcggtatgcaaggcgcgcagatattacaaacgacgttatgcgcgactatcgatcgcacgctgtggctgtgtgaatctaacggcagaccggatgaaaaggagtttcacgctcacctgcatagctggcaagcgctttgccatattctgcgcgatctacatagcggcgttaatttacccggcgtttctctttctgcggcggtagccttactggagcgacgcagtcaggcaattcatgccccggcgctggatcgcggcgcggctcttggcgcactaatgcgtctggaacatcccaacgccagtgccgaagcggcgctgacgatgctggcgcagttatccccggcacaatctggtgaggcgctgcacggtttgctggcgctggcccgccatcaactggcctgtcagccggcatttatcgccggtttcagcagtcatttaaatcaactgagtgaagccgattttattaacgccctgcccgatttacgcgcggcgatggcctggctaccaccacgagaacgcgggacgctggcgcatcaggtgcttgagcattatcaactggcgcaacttcccgttagcgcgctgcaaatgccgttgcattgtccaccacaggccattgcacatcatcaacaactcgaacagcaggcactggcaagcctgcaaaactggggagttttccatgtctgaactgaacgatcttctgaccacccgtgagctacaacgctggcgattaattcttggcgaagcggcagaaacgacgctttgtgggctggatgacaacgcccggcagatagaccacgcgctggagtggctgtatgggcgcgatcctgaacggctccagcgtggtgaacgttccggtggattaggtggcagtaatctcaccacccctgagtggatcaacagtattcacacgctgtttccgcagcaggtgattgagcggctggaaagcgatgccgtgctgcgctacggcattgaagatgtggtgacgaatctcgacgtgctggaacgtatgcagccttctgaaagcctgctacgcgctgttttgcacaccaaacatctgatgaaccccgaagtactggctgccgcccgccggatagtgtgccaggttgttgaagaaattatggctcgactggcaaaggaagttcgtcaggctttttctggtgtccgcgatcgccgtcgccgtagttttattccactggcgcgaaactttgatttcaaaagtactctgcgcgccaacctgcaacactggcacccgcaacacggcaagttgtatatcgaatccccccgctttaacagccgcattaaacgccaaagcgaacaatggcaactggtcttactggttgatcaaagcggaagcatggtcgatagcgtgatccactctgcggtgatggcggcctgtttgtggcagttacccggcattcgtacccatctggtggcgtttgacacaagcgtcgttgatctcacggcagacgttgccgatccggtagagttattaatgaaagtacagttgggcggcgggaccaatatcgccagtgccgtggagtatggtcggcaacttattgaacaaccagcgaaaagcgtcattatcctcgtgagcgatttttacgaagggggtagtagtagtttactgacgcatcaggtgaaaaagtgtgtccagagcggcatcaaagtgctgggactggcagcgctcgatagcaccgcaacaccttgctatgaccgcgatacggcccaggcgctggttaatgtcggcgcacaaatagccgccatgacgccgggcgagctggcaagttggcttgcggagaatcttcagagttgacataacttgcggagaatcttcagtcatgaatagtctacgtccggaattattagaactgacaccgcaggccctgacggcgttaagcaatgccggttttgttaagcgcagtcttaaggaactggaaaatggcaacgtcccggagatcagccatgagaacgacgctttaatcgccaccttcagtgacggtgtccgtacccagctggcgaacggccaggcactgaaagaggctcagtgcagttgcggggccaacggtatgtgccgtcatcgcgtgatgctggtgttaagttatcaacgactttgtgccaccactcagtctacggaaaaagaagaagagtgggatccggcaatctggctggaagaactggctacccttcccgatgctacccgcaaacgcgcacaggcgctggtcgctaaaggcatcaccattgagttgttctgtgcgccgggtgaaattccctctgcccgcttaccgatgagcgatgtgcgtttttattcccgcagcagtattcgtttcgcccgttgtgattgtattgaaggcacactttgcgaacatgtcgtactggcggtacaggccttcgtcgaggccaaagcgcagcaagcagaatttaaccatttaatctggcagatgcgcagcgaacacgtcacaagttctgacgatccgtttgccagcgaagaaggcaacgcgtgtcgtcaatatgttcagcaattaagccagacattatggcttggcggcatcagccagccgctcatccattacgaggcagcattcaaccgcgcattgcaggcggcagagacctgcaactggcgctgggtgagtgaaagcctacggcaactgcgcgccagcgttgatgccttccacgcccgcgccagccactataatgccggagaatgcttacatcagcttgcggcattaaacagtcgattaaattgcgcacaagagatggcccggcgcgacagtattggtgaagttcctcctgtgccgtggcgcacggtcgttggctctggcattgccggagaagcaaagcttgatcatctgcggctggtgtctttaggtatgcgttgctggcaggatattgagcattatggtttacgcatctggtttaccgatcccgacaccggcagtattttgcaccttagccgcagttggccgcgaagtgaacaggaaaacagtccggcagctacgcgtcggctgtttagttttcaggctggcgcactggcgggcgggcaaattgttagtcaagcagcaaaacgcagtgccgatggcgagctgctgttagctacccgcaaccgcttaagcagcgttgtgccgctgagccctgatgcctggcaaatgttgagcgcgccgttacgccagccgggcattgtggctttgcgggaatatttacgccagcgtccccccgcctgcatacggcctcttaatcaggtcgataacttatttattctgccggtcgctgagtgtattagcctcggttgggacagcagccgccagacgctggatgcgcaggtcattagcggcgaaggggaagataatgtgctgacgttaagtttaccagccagtgccagcgcaccttatgccgttgaacgcatggcggcgcttttgcaacaaacagacgaccccgtgtgtctggtttctggctttgtcagttttgttgaagggcaattgacactggaaccacgggtgatgatgacaaaaacccgtgcctgggcgctggacgcagaaactacgcctgtggcaccgctaccttctgccagcgttttgcctgtgccgtctactgctcatcagttgctgatacgctgccaggcgttacttattcaactgctccataacggctggcgctatcaggaacagagtgctattggtcaggcataattgctggcgaatgacctcaccgcggtgggtttttatcggctggcacatgtgttgggacaatttcgtaatacagaaagcgaggcacgggtagaagcaatgaataacggtgttttgctttgcgaacaattattccccatgcttcagcaacaaggatgaaatagtgctttttactaagagttctactccagttccggactgctcacgccacggtattaggcatatcctatatagcccctggtgagagtcaccagttccttgattaaataaaatggagttttacatgaaggctttcaataagctgttttccctcgttgttgcatctgttctggttttctctcttgctggctgcggtgacaaagaagaaagcaagaaattcagcgccaatctgaacggcactgaaattgccattacctatgtctacaaaggtgacaaggtgcttaagcaatcttctgaaaccaaaattcaatttgcctccattggtgcaaccaccaaagaagatgctgccaagacacttgagccgttaagcgccaaatacaaaaacatcgcgggtgttgaagaaaaattaacctataccgatacctacgcgcaggaaaacgtgactatcgatatggaaaaagtggattttaaagccctgcagggtattagtggaatcaacgtttctgctgaagatgccaaaaaaggtatcactatggcgcaaatggaactggtgatgaaagccgctggttttaaagaagtgaaataatcggttggcggtcatgctctaaacatgaccgccaattttttagccttttttcacatgctggcgcgctgccagtccacgcagaaaataacgtaaaaattgatcgccgcattcgcggaagtttttatgatccggtgcgcgcatcatcgctgtaatttccggcatgctaacgcggaactgctgttcggtgaggatagccagaatgtcatcggttttcaggctaaacgcgatgcgtaattttttcagcacgatgttgttattaatgcgacgttccggctccagtgccggagcagactcatccttgccgcgtttttcataaatcaggccattgaggaaactgctcaaaacaatgtccggacaacgctgaaaaccctcttcgtcttctttacgtagccagacggcgatctgttccgcggtggcttcgacattacccagcgccagaatacgcaccaggtcattattattggctttcaaaatgtagcgcacgctgcgcagaatatcgttacttagcatgaggccttcaggtgttgatgaggcaaaaagccattttagcagtcttttacaggccaatcgcctcttttaagcttttcagataacggcggctgaccggcacggttaagccattacgcaaaatcaactcggcctggccgttatcttccagacgaatctcctgtaaatgcgcgaggttaaccagatactgacgatggcagcgcagtagtggtgtacgactttccagggtacgtaatgtcaattcggtaaagccctctttcccttcgtggctggtaacgtagacaccgctcatccgactgctgacaaatgccacatctttcatttgcagcaaataaatccgactatgccccgtacaagggataaatttcagcgcctgttgattttccggtaacaggctaacatcctgcttgctgcgctcctgacgcaatcgcgccagcgttttctccagtcgcgcttcatcaattggcttcagcagataatcaaaggcatgttcttcaaaggctttaattgcgtattcgtcaaacgcagtgagaaaaacaatatacgggcgatgttccgggtcaagcatccccaccatttccagaccactgatgcgcggcatctggatatcgagaaacagcacatccgggcgcagtttatgcaccgcgccgatcccttccacggcgttactacactctccaacgatttcaatatcgctctgctcctgcaaaaatacacgcaggttctcccgtgctaacggttcatcatcgacaattaagactttaatcatgcctcgtccctccatggtagtcgtaacgttattcgggtgtaactatcaggctcacaggcgacgcttattccatagtcatcgccaaaccgttcacgtaaacgcttatccaccagattcatccccagcccactggcattggttaccggttgatacaaaccggcattgtcttcgatctccagcatcaaatgttgcccctcacgtcgggcgctgattgccactcgccctgtatccagcagttgacttgtcccatgtttaatggcgttttccactatcggttgcagggtaaacgcgggcaattgctgctgggataattcttgcggaatagcaatgttgacctgcaaccggctctggaagcgcgccttttcaatttgcagataagcattcacatgttcaatttcgtcggcgagagtaacaaactcgctaggccgctttaagtttttgcggaaaaaagtggaaagatactgcaccagctggctggcctgttcgctgtcgcggcggatcaccgctttaatggtgttaagcgcattaaacaaaaaatggggattcacctgggcgtgaagcagtttgatctcactctgggtgagcatcgctttttgccgctcatattgcccggcaaggatctgcgcgctaagcaattgcgcaatcccctcacccaacgtgcggttgatgctactgaataaacggtttttggcttcatacaatttgatggtgcccatcacccgctgattttcaccacgcaacggaattaccagcgtgctccccagtttgcattgcggatgcaaagagcaacggtaaggtacttcgttgccatcagcgtagaccacttcaccggtttcaatcgcttttaaagtataagtactagaaatcggtttgccgggtaaatggtggtcgtcaccaattccggtaaaggccagcaatttctctcgatcggtaatcgcgactgcaccaatatccagttcctgatacagcacctgagccactttcatgctgttcacttcgttaaacccctggcgcaaaatgccttccgtgctggctgccactttcagcgcagtggcagaaaaagcgctagtgtatttttcaaacatcgcgcgtttatcgagcaatatacgcataaacagcgccgcgccgacggtattggtgaccatcattggcgcagcaatattactcaccagacgcaccgcatcttcataaggtcgggcgatcgcaaggatgatcagcatttgcaccatttcagcgacgaacgtgacggcaccggcggtaatggggttaaagactttatcagtgcgcccgcggcggatcaggatgctgtgtaccaggccaccgagtaatccttcaacgatggtgctgatcatgcaacttaacgcggtcatgccccccatgctatatcgatgtaagccgccggtcagcccaaccagcccaccgacgaccggaccgccgagtaagccgcccattaccgcgcctatcgcacgggtattggcaatagaatcgtcaatgtgcaacccaaaccaggtgcccatgatgcagaagatggaaaagacgatgtagcagagaaatttatgcggcagacgaaccgtgacctgcattaacggtatgaataatggcgttttactcattaaccatgcaatgactaaaaaaacgcacatctgctgaagcagcagcaacaccagattaaaatcgtacatacccgcaaaccacacttccctttaaaacgcgtaacatacattgcctgcgtttaactttctttgaactcttgcagaaaaatgagaattcgtgagtacgatcactcaaaatcgcctggcaaaaataaaatcaccctatagatgcacaaaaaacgggcaaaactacctggttcgcaaaactgcgtctaaagttaaaccgggacctcgcgagcaagggtgagacgatggcgctttacacaattggtgaagtggcgttgctttgtgatattaatcctgtcacgttacgcgcgtggcagaggcgttacggattgctgaaaccgcaacggacagacggcggtcatcggctgttcaacgatgccgatattgaccggatccgcgagatcaaacgctggatcgacaacggcgtgcaggtcagcaaagttaaaatgctgctcagtaatgaaaatgttgatgtgcagaacggctggcgcgatcagcaagaaacattactgacttacctgcaaagcggcaatctacatagcctgcgaacgtggatcaaagagcgcggtcaggattaccccgcccagacactcaccacacatctgtttattcctctgcgccgacggcttcagtgccaacaaccgactctccaggcgctgctggcgatcctcgacggcgtactgatcaactacatcgccatttgtctggctagcgcacgtaaaaaacagggtaaagatgcgctggtggttggctggaatattcaggataccacccgtctgtggctggagggctggattgccagtcaacaaggatggcgcattgatgtcctcgcccacagcctcaatcaactacgccctgaactattcgaaggccgtacattgctggtgtggtgcggtgaaaatcgaacctccgcccaacagcagcaactcaccagttggcaagaacaaggccatgatattttcccactcggcatttaatgattcgttaacaaatgcgctttactgtacaatcctttcgttaacataaggagtgcattatgcgcatagctaaaattggggtcatcgccctgttcctgtttatggcgttaggcggaattggtggcgtcatgctcgcaggttatacctttattttgcgtgctggctaagcgcctgcaccagcctttcaaacaggcggtctgcgatgatcgccgccagtgccaccagtaacgccccctggatcacatacgcggtattaaatccgctaagcccgatgatgatgggcgtacccagcgtgctggcccctaccgtactggcgatcgtcgccgtaccaatgttgataatcacgctagttcgcacgcccgccagaatcaccggagccgccagcggtagctcgaccttacgcactcgctgaccacgactcattcccatacctttcgcaacttctgtcacgctggcatcaatcgctcccagcccggcaagtgtcgcctgcaggacgggcagcacaccgtaaaggatcaaggcgataatcgctggttgcagaccaaagccgatcaccggaacggcgatcgccagcactgcgacgggcggaaaagtctgtccaacggcggcaatagtttccaccagtgggcgaaattccgcgccccacgggcgagtgacagcaattccggcaccagtgccaatgatcaccgcaaacaaactgctaattcccaccagccagaaatgagccagtgccagagctgcaaaactttcttgctgataaacgggtcgtggcagttgtgggaacaaggcagcaaacagcggctggctgtaaggcagccagaaaatcagcgccacaaacagagcaatgagccagaacagcggatcgcgcaacatcttcatacgcttacgcctccaccagcagatcctgaaaatgcagcgtgccgcaaggctggccctgcatgttcaccaccggcagcacctcgcatccccgcgcaacaaacagagagagcgcatcgcgtagcgtcatctcttctgccagtgcctcaccatctgctcgttcttcgcgacgcacgtaatccgccacactacgtaagctaagcaggcgcacacccagttcactacgtccaaaaaactggcggacaaaatcattcgccggacgagtcagcatcgtcagcggattgccctgctgcactacttcaccgtgatccatcaataccagatgttctgccagccgtagcgcctcatcaatatcatgagtgaccagcacaatggtacgccccagcaaacggtgaatgcgcgtcatctcttgttgcaacgcgccgcgcgttaccgggtccagtgcgccaaaaggttcatccattagtaagacttgcggatcggcagccagtgcacgcgccactcccacacgttgctgctgaccaccggaaagctgatgcggataacgctcacgcaaattactctccagccccagtagcgccattaattcgtcgatacgatcgtcaatccgcgcccggctccatttttgtaattgcggcacggtagcgatgttttgcgccacgctccagtgggggaacaggccaatagattgaatggcatagcccatccggcggcgcaactccagtactggcaggctgcgaatttcttctccggcaaagcggatctctccgctgtcatgctccaccaggcggttaatcattttcagggtggtggatttgccggagccagatgtgccaatcagcacgctaaaactcccttcctgaaaattgagattgagatcgttaacggctttttgtgcgccgaacagtttgctgacatggctaaattcaatcattacgtttcaccttcagcagtgcgataagcaaatcgaacagcgcgtcggtaagcaccgccagaacaattaccgggatcacccccagcaacactaaatcaatggcgctgcttagcagcccctggaaaaccagcgcaccaaaaccgcctgcgccgattaacgccgcaatcaccgccatacctacagtttgcaccatcaccacccgcaggctgcgcagaaataccggtaacgccagcggtaactgaacatgcaggaaacgctgcgccccgctcatccccatcgctctggcgctttccagcacatcgcgcgggatctggttcaaaccgactaccacgccgcgcaccagcggcagcaaggcatagagcaccagcgcaatcagtgcgggtgtcattccggttcctgctatgccgagcgtccccagccacggaaaggccgtaaccagcgcggcaagcggcgcaatcaacaggccaaagagcgccacgctaggcacggtctgaatcacattgagcagagaaaaaattgccccctgccgagcagtggaaaagtagcaccagatgcccaacggcacaccaatcactaacgcaggcagcaccgcaccaaacagcaacgtcagatgttgtgccagcgcgtcgtcaaacacatcctgacggttggcgtattctttcattagactgagatcgttaagcgtgccggagtacagcaaccacagcggaataatggcaatctgcatatgcaacaaccagcgccacagcggatgcgtggagattcggcggatggcatcgctacaggccagcaatgccagcgccgcagccagccagaaaccactgccgaggctggtacgcgccagcgcactgccattttgcgccagttgggtcgccgcctttccagctccccacaccagcaatacgaagacgaattgcgccagaatgagtgcacaaatgctgccttttttaccgggaataaaacaggccgtcagccaggcgcaaccaacgcccaccagcatccagatcgtttgcggccacagctgccagagatgacgcccctcaccgctaactaaacgattaggcgcgtaactgataaacggcagcgccgctgcgattgccgtcagcaacagcagcagcgccagaacaggattaatacggaaataagtcacgggaaattacttcgtccaccctttttgtttcaggtagtcggcagccacttttttggcatccagtccttccacagcaatgctggcattcagttgctgcaatgtttttgcatcgaggctggcgaagactggctgtagccactgtgccatttgcggatactccctcaacacgctctcacgcaccactggtgcaggcgcgtagataggttgcacaccttgcggatcgcttaaggtttgcagccccagcgccgctaccgggccgtcagtgccgtaagccattgcagcattaacgccagaggtttgctgggcagcggctttgatcgtcaccgccgtgtcgccaccagccagactcagcaactgatcctgaccgagcttaaagccataggctttttcaaacgcgggtaacgcatcggcgcgttcgataaactctgcgctggctgccagtttgaaggtgccgccctcttgcagataacgactcaggtcggcaaggctagtgagtttatttttctctgccacatcctgacgcacggcgatagtccaggtgttatttgcaggcgcgggcgtcagccagattaacttgttgtgctcgctatcgagctttttgactttctcgtaaccttgctgcgcgtttttccacgctgcatcgttttcatctttaaagaagaaagcgccattgccggtatattccggatagatatccagttcaccggaagtaatcgccccgcgcaccacaggagtcgttccgagttgcactttattcaccgtcggtacgccgtggctttccagcacctgcaaaatgatattgccgagtagcgcaccttcggtatcgattttactaccgactttaacgggggaagccgcctgtagcggcaggctcacggctgccaacataaccagactacctgcccagagctttaagagtggcatgatgctttcctcattcttttactgttgttttcagcgaattaagagaaaagcatagttgataatggcggggttagcttgagcggaaggattcagttgcagaatcagataaatacttaagaggcatattcggtccggcgtttcctgccggatgcggcgcgagcgccttatccggcctacaaagggcgcaaacgtcgcgcccttactaaagcattacagcaactcaaactcgcctttcttaacgcgtgcggaatcagtgccgataaagacattgaacttgccaggctcggcgtcatatttcatctgttgattccagaacttcagcgcctcaatatcgatcgggaagctgacagtctgagtttcgcccggtttcagggtgattttctcaaagcctttcagctgtttcacagggcgactcatggaagccgtcacatcctgcaagtacatctgcactaccgtggcaccctcgcgcttaccggtgttcgtcacctgcacgctggcagtcactttgccgtcacgcttcatggtcggcgcagaaagtttcacatcagagacggtgaaagtggtgtagctcagcccatagccgaacggatacaacgccccgttagcttcatcaaaataacggctagtgtatttgttcggcttgtcggcattatacgggcgaccggtattcagatggctgtagtacaccgggatctgcccgacagaacgcgggaaggacattggcagcttgccggacgggttgtaatcgccaaacaatacatcggcaattgcattaccgccttcagtccccgcaaaccaggtttccagaatcgcatcagcctgctgatcttctttcaccagcgccagcggacgcccgttcatcagcaccagcaccagcggtttaccggtggctttcagcgccgcaatcaagtcacgttggctttgcggaatagtgatatcggtccggctggaggcttcgtgcgccatcccctgtgcttcaccgactacagccaccaccacatcagattgtttcgccgtctgcaccgcttcatcaatcatctcttgcgggctacgcggatcgactttgaccgcttcttcatactgattcaggaaatcgataatgcctttgtcactggtaacgttcgcccctttggcatacagcactttaccgttttcaccgacggcatttttaatcccggtcagtacggtcacggattgatcggcaacaccggctgcggaccagctgcccatcacgtcacgtttactgtccgccagtggcccaaccaccgcaatggtggcgctttttttcagcggtaacgtttcgagacggtttttcagcaacaccaagctttcgcgcgccacttcacgcgcttctttacggtgcaggcggctttcggcattggtatccaccgggtcagactctttcggccccaaatggctgtatgggtcgttaaacaaccccatatcatatttaacgttcagtacatggcgggcagcatcgtccagctctgccatcgtcactttgccggatttaatcaacccaggcagatacttgctgtagtactcgtcgctcatgctcatgttgattccggatttcagcgccacgcgcaccgcatcttccgggtctgccgccgtgccatgtttaatcagctctttgattgcaccgtgatcggaaacggtgatgcctttaaagccccactggtcgcgcagaacatctttcagcagccaggaatcggaggtggctggcgtgccgttcaggctgttcagcgccaccatcaccgcgccgctgcctgcgtccagccccgctttgtacggcggcatataatcattaaacaggcgctgcggactcatatcgacggtgttgtactctttaccgccttctaccgcgccgtatgcggcaaagtgtttgacgctggtcatcacgctgtagcgatctgccgggcttttaccctgcatcgcttccaccatggttttacccattgtactggtgagatacgtatcttcgccaaaaccttcggaagcacgtccccagcgcggatcgcggctgacatcgaccatcggtgcccaggtcatattcaggccatcatctgccgcttcataagcagagacacgtccgaccgttttcactgcatcgaggttaaaagagctggccagaccgaggctaatcgggaacaccgtgcgctgaccgtgcagcacgtcgtaagcaaagaaaagaggaattttcaggcggcttaattccatcacctgatcctgcatggcgcggatatcctgacgggttacggtgttgaaaatcgccccaacctgaccgtctttgatcatctcgcggatcgcctctttcgggttatccgggccgacgctgattaagcgcagctgaccaattttctcatcaactgtcattttcttaagcagttcggtgacgaacgcatcccgcgcttcgggcgttaatggatggttgccgaataaatcatccgccagtgctggctgcagggccagactcaccgcgattcctacactacatagccatttcatatggatttttcttcctttgttgcccgacgtggcagcgaaaatggtgcaaaaaccgtagtttgccataagcatgatggagagagaaaaagaatgctcagtttattgtctgaattttcaaaatattcactcgctgaattgttatacaaggcgctattctagtttgtgatattttttcgccaccacaaggagtggaaaatgtcttccatgacaacaactgataataaagcctttttgaatgaacttgctcgtctggtgggttctagtcacctgctcaccgatcccgcaaaaacggcccgctatcgcaagggcttccgttctggtcagggcgacgcgctggctgtcgttttccctggcagtctactagaattgtggcgggtgctgaaagcctgcgtcaccgccgacaaaattattctgatgcaggccgccaatacaggcctgaccgaaggaagcacgccaaacggtaacgattatgatcgcgatgtcgttatcatcagcaccctgcgtctcgacaagctgcacgttcttggcaagggcgaacaggtgctggcctatccgggcaccacgctctatagcctggaaaaagccctcaaaccgctgggacgcgaaccgcacagtgtgattggaagtagctgtataggcgcaagcgtcatcggcggtatttgtaacaactccggcggcagcctggtgcaacgtggcccggcgtataccgaaatgagcttattcgcgcgtataaatgaagacggcaaactgacgctggtgaaccatctggggattgatctgggcgaaacgccggagcagatccttagcaagctggatgatgatcgcatcaaagatgacgatgtgcgtcacgatggtcgtcacgcccacgattatgactatgtccaccgcgttcgtgatattgaagccgacacgcccgcacgttataacgccgatcctgatcggttatttgaatcttctggttgcgccgggaagctggcggtctttgcagtacgtcttgataccttcgaagcggaaaaaaatcagcaggtgttttatatcggcaccaaccagccggaagtgctgaccgaaatccgccgtcatattctggctaacttcgaaaatctgccggttgccggggaatatatgcaccgggatatctacgatattgcggaaaaatacggcaaagacaccttcctgatgattgataagttaggcaccgacaagatgccgttcttctttaatctcaagggacgcaccgatgcgatgctggagaaagtgaaattcttccgtccgcattttactgaccgtgcgatgcaaaaattcggtcacctgttccccagccatttaccgccgcgcatgaaaaactggcgcgataaatacgagcatcatctgctgttaaaaatggcgggcgatggcgtgggcgaagccaaaagctggctggtggattatttcaaacaggccgaaggcgatttctttgtctgtacgccggaggaaggcagcaaagcgtttttacaccgtttcgccgctgcgggcgcagcaattcgttatcaggcggtgcattccgatgaagtcgaagacattctggcgttggatatcgctctgcggcgtaacgacaccgagtggtatgagcatttaccgccggagatcgacagccagctggtgcacaagctctattacggccattttatgtgctatgtcttccatcaggattacatagtgaaaaaaggcgtggatgtgcatgcgttaaaagaacagatgctggaactgctacagcagcgcggcgcgcagtaccctgccgagcataacgtcggtcatttgtataaagcaccggagacgttgcagaagttctatcgcgagaacgatccgaccaacagcatgaatccggggatcggtaaaaccagtaaacggaaaaactggcaggaagtggagtaaaaattacggatggcagagtatcgccatccgaattcacttaatcgttctgtgccgtctgccccgccgccgccatttgggcggctttttgttttttatagctcaacgctgctgccggcacaggcatcactttaccggtttcaatccaggtacgcaggcggctggcatcggcaaaatgggtatatttgccaaacgcgtccatcactaccagcgccaccggtttattattgataaccgtacgcatcaccagacaatggcccgccgcattggtaaagccggttttggttaactgaatattccagttatcgcgatacaccagatgattagtattgcggaacggcagcgtatacgtcggattagagaaggttgccatatcttcccgggtagtacttaactgcccgatcaacggatattgtttgctggcaatgagcagtttggttaagtcacgggcagtactaacgttatgcacgctcaatccggtaggttcaacaaagcgcgtgttgttcattccgaggcttttcgctttcgcattcattgccttaataaaggctttgtaaccaccgggataatggtgcgcaaggcttgccgccgcgcggttttcactagacatcagcgccagcaacagcatatctttacggctgatttcgctattcagtcgtacgcggctatagacccctttcatctccggcgtctggctgatatccacttttagtttttcatccagcggcagtcgtgcatccagcacaaccatcgcggtcattaatttgctgatagacgcaatcggacgcaccagatccgggtggttgctatagatcactttgttggtattcagatcaacaatcatcgcgctaccggaggcaatttccggttgactagcggtggtagcggctgccgttttcgcaacggcctgcggtgcaaaaggcacagccagcatcagggccaggctaaataaagaaactcgaaatttcggcatgatgagcattcagatagtggttcacgcgcacgggttgcgcaccgccggagtaaggatttactgaggctagcgacgccatcataacgagcaaaaagtgcgatcgtcaaaggagaatcgtgaggaaatgctgcattgctgacatttacgccagcaatgcaacgtcaaagaactttttagaacaaacgataaccgtagccccatagtataacggttagggcgagcagcacttccagtaccagcacgccaatcgccagcgtgctactagagaagctaaggccttcctctttgttgatattcaggaagctcggaataccaaggtaaagcaggtagccggtgtaaaacagcgccaccgtgccgaccagcgcacacaaccagaccagtggataaagcgccaccagaccgcttaaaaacagcggagttgcaacgtagcccgcgaagaccatgcagtgcgcaagactcggacgctgcggataattacgcgccatccaccagatgacccgccccatcaccgcgaccccagccagcataacgccgtaaaacaagacagccagcgccagtccggtaaaccaggataacttcaggatagtgccatcgccaaaattccagccaatctgtgtagtgccaatgaaggcgcaaatcaccggaatcgccgccatcagcaaaacgtggtgggtgtaatggtgagaaatcgtttcgttttcgcgattaatcacctgcatttcacgatcgggatgggaaaacagtccccagacatggctcataccgcccccttgttgtgagttcatgaacctgacagttcaagtataagtcagcttgtgattattttttgttcgcccatgtaattttcactgtctgatgaacgtcctttttcagcgtgaatgattcacagggtgtatgcttactggcaaccaaagggagacagactggcctatggatctcaatacacttatcagtcaatatggttatgccgcgctggtgatcggtagcctggcggaaggtgaaaccgtgactttgctgggaggcgttgcggcgcatcaggggctattaaagttcccgctggtggtactttctgtggcgcttggcggcatgattggcgaccaggtgctctatctgtgcgggcggcggtttggcggcaagctgttacgccgtttcagcaaacatcaggataaaattgagcgggcgcagaaacttatccaacgccatccgtatctgtttgtcattggtacgcgctttatgtatggctttcgggtgattggcccgacgctgattggtgccagccagctgccgccgaaaatctttctgccgctgaatattctcggcgcatttgcctgggcgttgatttttaccactattggttacgctggtggtcaggtgattgcgccgtggttgcacaatctcgaccagcatttgaagcactgggtctggttgattctggtcgtggttctggtggtgggcgtgcgctggtggctgaaacgacgcgggaagaaaaagccggatcatcaggcgtaaaaccattgccctggataaggcgttcgcgccgcatccgacatccggagtaccatgcctgatacgacgcttgtgcgtcttttcatgccgaccaaaatattacccaatgaaatatccacgcacctcactgcgttattctgggttgaactgtggattcgccaacataaagccgccatccactatcaagctctgcccggtggtgtaatttgcgccctcgctacaaagccacaccaccaggctggcaatctcatgcgttgcgccaaaacgccgcaagggaatgctaggctccgcgtcgggcttcacgtcgctgtcatccatgccattcattggcgtggcgatcgccccaggcgcgactgcgttcaccaaaatcttatgcctgaccagctccagcgccatcgctttggttaacccaccgagcgcatgtttagcggctgtgtaggcgctggcatccggcagcggcgtatgttcatgtacgctcgtaatgttgatgatgcgaccgccctgcccttgtttcaccatctgacgagccgcaatttggctgcataagaatgcaccatcgacatcaacggtaaaaatcttgcgccactcatcaaaagccatatcaagaaacggcgctttggtcattgcacccgcattattcaccagcacatcaatgcgccccagccgttgaatgagtttctccagcgccagtgccccttctggtagattgccgagatccagctgcacgatctccgcacgtacgccgtggctaactacctcacgcgcggtatcttttgccccttcttcatcactgtgccaggtaataccaatatcaaacccctgctgcgccagtaataacgcgcactctttgccgatcccgctatcggaggcggtaataatcgcaacctgtgccatcgagttctccacttaacgctgaataaacgttaagtatagaaggcgcatatcatcagcgtttgtaccccccgcccaacgcaccagtgagttgaatggaggcatccagccactgcccttgcaataacaggccattggcccgctcacgcagcgcggggattctggcttcgctgacgcgggaaccagcaatgatgcccgcgttaaagcgcgcctgcgcaagacctaccacacgcaaggcatcgcgctcaatttgcgcctgatgctggtttttctccgccagtgtctgaacctgactggctgcccgcgccacgtcattcaccgcttcaaccaccgctttgttgtagctggcgatagacaagttgctttcggcttttgcgatatcgagattggcgttaagacgaccactatcgaaaatgggtagcgtcaggcctgccgtaacgcccatttgctgcgcggaatgacggaacagatcgcttaagtgcaacgcatcctgttgcaggaaggccatcaggttgatgtcaggataaaatgccgcttttgccgcatcaatggtgcttaggctactctcaacgtaccagtgcgccgcctgcaaatctgcccgccgggccagtaaggagtaccccagttcatcaggaagctggcttgccactttcggcaacgcgaccggtttaagcttcaaactctttgtctggttatttgtaagtgcgcttaaccgtgcctcaataattttcattttccccgcgacatcgttgagctgctgccgggttttgctggcattaatatcggtttccacaccttcaacactagaagtaatcccgttctgatatagctggcgatcggtcgcgataatggtgttctgctctttttctatttgctgcaagaccgtgtttaacgccgcctgggtttgccactcccagtacaggcgggctacgctgccagccagcaattggcgggtttgctcgcgttccgccgcccgtgctttaaccgtacccaggcgggcagtaacctccgcccgattctttccccagatatcgagatgccagcccgccgttaagccaaaagtaccgttggtgtaccacgggccggtcgtacctgcggccggatcgttcagagcaaacggccccattaagccttctgcgctcattttttgccgctccatatccgccgaaaagtcgatctgcggaccatcctgagtggcaactgccttcgcctgggcttcagctagctgaatgcgctgttcagccacctgcatatccggtgcgttctgtagtgcattgttaattaaggaagactgttgattatcgtgatactccagccaccattggctgtctggccaaccattttcagcgccgtgggtaatgcggtgtcaacttgtgcagcgggcgtttgctggcttaacgcctggcgggtttcatgcataggcgcacacccggccagcatcagtaacagcggaaaacaggcgatggctggataaaaggaatcacgattcatgggggaataatcaggtaagaaaaggtgcgcggagattaccgtgtgttgcgatatattttttagtttcgcgtggcaatacatcagtggcaataaaacgacatatccagaaaaatatacactaagtgaatgatatcttccgatttatcttaatcgtttatggataacggcaaagggcttcgttttttcctatacttattcagcactcacaaataaaggaacgccaatgaaaattatactctgggctgtattgattattttcctgattgggctactggtggtgactggcgtatttaagatgatattttaaaattaattaatgtcatcaggtccgaaaataacgagaatatttcagtctctcatcctgttgcgctcctgtcatgtgcattgcttcatataatcactggcgcaaggagcgcgcagggggcggccaatcgccgccgccccctgcacccccgggctctggcgaacaaaatcgccgctgcgcggtgccctcggcttatcccttacggctaccgggtcgggcgcgaggtaacatccctgtaaaacgcgccctcagcccacatccatgtgggctgccccggccttcagggaacgcctcggcaattttgacgccaccaaacaaccgtgcggcctattgataaagagctaacacattgtcaaaaaacatcactatggttttttagagtttctcgatatcaattgcctgaatagcccttgcaatatcaggggaattattcaacacccgaacatgctgaaataattccgttgcttcatcgtattctttacgcaaataactcaaccactgtttaatccgcgcaacgtgatataacccggtatcgccctgcttttccagacgggtatatttttgcagcaaagcaaccacctccggccacggcattcgcggttcgttatattttaccacccggctcaggttgggaatattgagcgccccgcgaccaatcatcactgcgtcgcagccgctgatcgccatgcattgttgcgcgctctgccagtcccagatttcaccgttggcaatcaccggaatattcagccgctggcgaatatcgccaatcgcctgccagtcaatatgctccgcgcggtaaccctgctctttcgtccgcccatgcaccaccagctccgtagcgccagcctgttgaaccgcatcggcgatttcaaatttcttctcaccgctgtcccagcccagacgcactttcacgctgacgggcaaatgcgccggtacagcttcacgcatcgcttttgcaccctggtagatgagttcaggatctttgagtaacgtcgccccgccgccgctaccgttaaccgttttgctcgggcagccgcaattgagatccacgccccaggaacctaactccaccgcacgggcggcgttctctgccagccattgtgggaactgacctaacaactgcacgcgcaccagcgtaccagatggtgtccggctggcgttttgtagctcagggcaaatgcgatgaaagacttttaccggcagcagttgatccaccacgcggacaaactcggtgatgcacagatcgtagtcgttaacttcggtcagcaattcacgcaccagagagtcaagcactccctccatcggtgccagtaacacacgcatatcatcacccgcaaaaaaatgaggcgctatgttagcgcctatggtcagcggattaaaggtctgcaaagagggattgctgcaaactgcaatccctctctatgcttgatgtatgcctgagttcgctgcgcattgcgtaatgccggggagcgaaaaaataagcgctgatttcttaatgtgatcggtagcacgttttacgaattaattgtatgatgaatccatctcatctggggtgttgattatgagtaagacactgaacattatctggcaatatttacgcgctttcgtcctgatttatgcctgcctgtatgcaggcattttcattgcttccctgctaccggtaaccattccgggcagcatcatcgggatgctgatcctgtttgtcctgctggccttgcaaattcttccggcaaaatgggtcaatccggggtgctacgtactgattcgctatatggcgctattgtttgtgccgattggcgtaggcgtcatgcaatattttgatttgctccgcgcacagtttggcccggtagtggtttcctgtgcagtcagtacgctggtggtttttctggtggtgagctggagtagccaactggtacacggtgaacgtaaagtcgtaggtcagaaaggaagtgaagaatgatggcgaatatctggtggagtttaccgctgacattgattgtcttttttgccgcccgcaaactggcggcacggtataagtttcccttgcttaacccgttgctggtagcaatggtggtgatcattccttttttaatgctgactggcatctcttacgacagctactttaaaggtagcgaagtgctaaacgatctgctgcaaccggcggtcgtcgcgctggcctatcctttatatgagcagctacaccagatccgcgcgcgctggaaaagcatcatcaccatctgttttatcggcagcgtggttgcgatggtgacggggacttccgtggcattgttgatgggcgctagtccggaaatcgccgcgagtatcctgccgaaaagtgtcaccacgcctattgcaatggcggttggcggcagtattggcggtattccggcaatcagcgcagtttgcgtgattttcgtcggcatcctcggcgcggtatttggccatacattgcttaatgcgatgcgtattcgtaccaaagctgcgcgcggtctggcaatggggactgccagccacgccctcggtacggcgcgctgcgccgagctggattatcaggaaggtgcatttagtagcctagcgctggtgttatgcgggataattactagcctgatcgcaccgttccttttcccgattattctggcagtaatgggctaaaatttgcgatgcgtcgcgcatttttgatgtatgtttcacgcgttgcataattaatgagattcagatcacatataaagccacaacgggttcgtaaactgttatcccattacatgattatgaggcaacgccatgcatccacgttttcaaaccgcttttgcccaacttgcggataacttgcaatctgcactggaacctattctggcagacaagtacttccccgctttgttgaccggggagcaagtcagtagcctgaagagcgcaacggggctggacgaagacgcgctggcattcgcactacttccgctggcggcggcctgtgcgcgtacgccattgagcaattttaatgttggcgcaattgcgcgcggtgtgagcggaacctggtatttcggtgccaatatggaatttattggtgcgacaatgcagcaaaccgttcatgccgaacaaagcgcgatcagccacgcctggttgagtggtgaaaaagcgcttgcagccatcaccgttaactacacgccttgtggtcactgccgtcagtttatgaatgaactgaacagcggtctggatctgcgtattcatctgccgggccgcgaggcacacgcgctgcgtgactatctgccagatgcctttgggccgaaagatctggagattaaaacgctgctgatggacgaacaggatcacggctatgcgctgacgggtgatgcgctttctcaggcagcgattgcggcggcaaaccgtagccacatgccttacagtaagagcccaagcggtgtcgcgctggaatgtaaagacggtcgtattttcagtggcagctacgctgaaaacgccgcattcaacccgactctgccaccgttgcagggagcgttaattctgttgaatctcaagggttatgattacccggatatccagcgcgcggttctggcagaaaaagccgatgcgccgttgattcagtgggatgccacctccgcaacgctgaaagctctcggctgtcacagtatcgaccgagtgcttctcgcttaagcctggtgccggatgcggcgtgaacgccttgtccggcttgccagccctctcctggtgtcgaaattcccggcaaacagtttgccgtttcttgcgcaaaaccagcgggtaaagtagcctgatggaaattttccttagatcgagtctcctgcatgttaaagcgcgtgttcctcagcctgttagtcctgatcggcttgctgctgttgactgtgctcggcctcgatcgctggatgagctggaaaaccgcgccttatatctacgacgaattgcaggatctcccctaccgccaggtcggtgtggtgctcggaacagcaaaatattatcgtactggcgtaattaatcagtattatcgctaccgcattcaaggagcgattaatgcctataacagcggtaaggtaaattatctattactgagcggcgataacgcattgcaaagttataatgagccgatgaccatgcgcaaagatttaatcgctgctggtgtcgacccaagtgatattgttctcgattacgcaggctttcgtacgctggattccatcgtgcgtacacgcaaagttttcgatactaatgatttcattattatcacccaacgtttccactgtgagcgagcattatttattgcgctgcatatggggattcaggctcagtgttatgccgtaccgagtccgaaagatatgctgagtgtacgtattcgtgaatttgccgcccgtttcggtgcgctggctgacctttatatttttaaacgtgaaccgcgttttttagggccgctggtccctattccggctatgcaccaggtaccggaagatgcgcaggggtatcccgccgtcacacccgaacagttacttgaattacaaaagaaacaaggaaagtaattatggatgtacagcagttttttgtcgttgccgtttttttccttatcccgatattttgtttccgcgaagcatggaaaggctggcgcgcaggcgcgattgataaacgggttaaaaatgcaccggaaccggtgtatgtctggcgagcaaaaaatcccggactctttttcgcttatatggtggcatatatcggcttcggaattttatctatcggcatgattgtttatcttattttctatcgttaatattcccctctccagttaattattgagaataattattacttcacctgataagctgcggatatcacattcctaaccgcagctatttgtgaatcttttcacagtttaaattcccccgcacgcttagccttaatatcagtacattattatttactaaacgctcgccttaattacctatagcattaaggaagatcacatgccgcaacaaaattatctggatgaactcactccggcttttacgtctttactggcgattaaagaagcctctcgctgtttattatgtcacgacgctccctgtagtcaggcttgcccggcacagaccgatccggggaaatttattcgcagtatctactttcgtaattttaaaggcgctgccgagacaattcgcgaaaataatgccctcggtgccgtttgtgccagagtgtgcccgacggagaaattatgccaaagcggttgtacccgtgccggtgttgatgctcccattgatatcggccgcttacagcgttttgttactgattttgaacaacaaaccggaatggaaatttatcagcccggtactaaaacgctcggcaaagtcgcgattattggcgcaggtcctgccggattgcaggccagtgtgacactgacaaaccagggttatgacgtcacgatttatgagaaagaagcgcaccccggtggctggttgcgtaacggtattccgcaattccggttaccgcaaagtgtgctggatgcagagatcgcccgtattgaaaaaatgggcgtgaccattaagtgcaacaacgaagtcggtaacacactcacccttgagcagctgaaagcagaaaaccgcgcggtactggtcaccgtggggttaagtagcggttccgggctaccgctgtttgagcatagtgacgttgagattgccgtcgacttcttgcaacgtgcacgacaggcgcaaggcgatatcagcattccacaaagcgcattaattatcggcggcggtgatgtcgcgatggacgtagccagcacgctgaaagttctcggctgtcaggcggtaacttgcgtagcgcgtgaagagttagatgagtttccggcaagcgaaaaagagtttaccagcgcccgggagctgggcgttagcatcatcgatggattcacgccagtagccgtggaaggcaataaagtcacgtttaagcatgtacggttaagcggcgaactgacgatggcggcagataaaattattctcgccgtcggtcagcatgccagactagatgcctttgcggagttagagccgcagcgtaacaccatcaaaacacaaaattaccagacccgcgacccgcaagtctttgctgctggcgatattgttgagggtgacaaaaccgtggtctatgccgtgaaaaccgggaaagaagccgccgaggcgattcatcactatttagagggagcttgcagttgttaaattaatatttagagggagcttgctcatgttaacgaaagatcttagcattactttttgcggcgtgaagtttcccaacccgttctgcctctcttctagcccggtaggcaactgctatgagatgtgtgccaaagcctacgacacaggttggggcggtgtggtgtttaaaacgatcggcttttttatcgccaacgaagtcagcccgcgttttgatcatctggtgaaagaagataccggttttatcggcttcaaaaatatggagcagattgctgaacatccgttggaagagaatctggccgccctgcgtcggctgaaggaagattacccggacaaagtattgatcgctagcatcatgggggaaaatgagcagcaatgggaggagctggcgcgcctggtgcaagaagctggcgcggatatgatcgagtgtaacttctcctgtccgcaaatgacttctcatgcgatgggtagcgatgtcgggcaaagcccggagctggtagaaaaatattgtcgggcagtgaaacggggttccacgctgccaatgctggcgaagatgacgccgaatatcggtgatatgtgcgaagtggcgctggcggcgaagcgcggcggcgcagatggcattgcggcgattaacaccgttaaatccatcaccaatatcgatcttaatcagaaaatcggtatgccgatcgttaacggaaaaagcagtatttccggatattccggtaaagcggtaaaaccgatcgccctgcgcttcattcagcaaatgcgcacccatccagaactgcgcgatttcccaatcagcggtatcggcggcattgaaacctgggaggatgcggctgagtttttattgctcggcgcagcaacgttacaggtgaccaccggcatcatgcagtacgggtatcggatagtggaagatatggcaagcgggttgagccattatctcgccgatcagggatttgatagcctgcaggagatggtaggtctggcgaataacaatattgtcccggcggaagatttagaccgcagttatattgtctatccccgtatcaatcttgataaatgtgttggctgtggacgctgttatatttcctgttacgacggcggtcaccaggcgatggaatggagcgagaaaacccgcacaccgcattgtaataccgagaaatgtgtgggttgtctgctttgtggtcacgtctgcccggtgggttgtattgagctcggggaagtgaagtttaagaaaggcgagaaagaacacccggtaacgttgtaaaaccagagacgcatccggcatttggttcctgtcgccggatgcggcttgaacgccttatccggcctacaaaaccatacaaatcagtatgttgagcttattgtaggccggataaaacgcgccagcgttgcatccggcatttggctcctgttgccggatgcggcgtgaacgccttatccggcctacaaaaccacacagatcatgatgttatgtgcgtttatgaccgaatgcggaccacattcacatcatttcttacgcgcgtatttcagactatccagcgctacggcgaagataataatcgcccctttgatgatgtactgccagtatgggtttacgccgatatacgtcaggccatagttgatgacggtaaaaataattaccccggtcaccacgccaatcaccgtccccacaccgccgctgaagcttacaccgcctaccacgcacgccgcgatagcatccagctcatacataaagccgaggttgttggtggcagagccgatacgtccggcttctaacatcccgccaaaggcatagaacacgccagacaacgcgtagatcatcagcaggttcaggccgacgttgacaccagatacttttgccgcttccgggttaccgccaatggcaaaaatgttcttaccgaagcgggttttgttccacaacacccagacgaacgccaccgcaatcaacgcgtagaaggtgatgtaagagagacggaaactccccagcgcgacaaagccctgagcaaaggtagagaagccactgtcaaaaccagaaattgggctcgccccgacaaagtcgtaatagaggctgttgatgccatagacgatgatcatcgtgccgagcgtggtaatgaacggcgtcacgttgagataagcgataatcagaccgttgatcaaaccgatcaccgcaccaatggcacagacaatcagaataaccagcgcaatcggcatcgtcgccatttccgggaacactttgttggcgttatccatggactgcaataatgtcgcagccaccactgccgccagccctacctgacgaccagcagaaagatcggtcccctgggtgacaattaaccctgccacaccgagcgcgataataatacgcacgctactctgggtgagaatattacttaagttcaacagacttaaaaatgttgggtcctggaaaataataatcgccagcaaaactaaaagaacgacgtaaataccgccctctttcaggtaagtaagaaaacttttcttatttaacgcactcatgggaagcccctaatcttaaaggtgcaaagacgcaagacgcagaatttcgttttgcgttgttgtttttgtatcgacaattccggaaacgagaccattgctcatgaccagaatacggtctgttatccctaacaactcaggcatttcagaggagataataataatccccttgcctttcttcgccagttcggcaattaactgataaatttcaaacttcgccccgacatcaataccgcgcgtcggttcatcgagcattaatatttctggttgcgttagtagccagcgaccaataatcaccttttgctgattaccaccggagaggctaccaatttgcgtccgatgacccggcgtttttacccgcatgctatcaatcacccactgggtatcgcttttcatccggctgttatccagtaaaccaactttatttttgtagttgcgaatattggaaattaagctgttaaaaccaatatccagataggcataaattcccgtactgcggcgctcctcagttaccagtgcaaatccatggtttatggcttcgttggcattatggttattgatctgtttgccgtgcaacgttatggtgccagcgcttttctcgcgaataccaaataacgtctcaacaatatcggtacgtttcgcccccaccagaccggcaataccgaggatctcccctttatgcagatcaaagctgacatcgcgaatgctcggctggcgcagactcgtcaggttacgtacctcgaggatgacttcgcccggtttgttttctttgtcagggaaacgctggttaagagaacgcccaaccatcatggcgatgatcttgtccatcgtcagtcctgccagcggttcggtggcgatccactgaccgtcgcgcaatacggtaacttcatcacataactggaagatttcttccattttatggctgatataaacaataccgcagccgcgctcttttaatttacgaataatagtgaacagatgattgacctctttttcggttaagctagaagtcggttcatccataatcacaattttcgcgttataggaaaacgctttggcgatttcgatcatctgcatttggctaacggataatgtgccgacgcgcgcacgcggatcgatatcaatatccagttcgtcaaaaatcgctttggtttcgcggtacattttgtcctgatcgacaaacatgcctttggtgggatatcgccccagccacatgttatccatcacgctacgttgtaataccaggtttaactcctggtgtaccatgctaataccattttccagggcttcttttgcagaatggaaatcgatctctttaccctggaataaaatggtgccggagtctttttgataaataccaaacaggcattttaataatgtgctttttcctgcaccgttttcccccattaatgcatggatagaatgtggccggacttttaaattaacgttatcaagtgccttaacaccaggaaaggacttgttgataccgctcatttccaacaagtattccccggaggacggagtcgtactgctgaccatataattttaccttgttggccatacaataagggcgcagtaatagactgcgcccaatcagtcttatttcttgctgaattcagccaggttgtctttatctacgccaacataaggtacgcggaccactttgttgtcgattttccagttggtgccatcagccgcacctttaccatcggccaggtttttcgccagatcaaaggtcgctttcgcctggttgttagcatcgttcagtacggtgcccgccagtgcaccggatttcaccagcgccagcgcttctggcagcgcatcgacgccaaacaccggaatgctggacttgttgtgtgctttcagcgcttcaaccgcgcccattgccatcgcatcgttgttggcgataaccacttcgattttgttggcgttcgggccagacagccaggcgtccatcttatctttcgcctgagcggtgtcccacattgcggtatctaactgtaactgttcagttttgatgcctttatcgttcaattctttaatcacgtaagtggtacgtgcttctgcatccggatggcccggttcacctttcagcagtacgaactgaatctgaccgtctttgttcagatcccaaccctgattcgccgcccagtgtttagcaatcaaatcgccttgaataatgccggactctttggagtcagtgccaacgtagtaggctttgtcgtagctatccagcgccttacgagacggttctttgttgaagaaaaccaccggcacgttttgcccacgcgctttctcaatcaccgtacccgcagctgccgggtcaaccaggttgattgccagtgccttcacccctttcgccagcaatacgtcgatctgatcgttctgcttggactggtcattctgagaatcattcatcagcagctgaacatctggcgcggctttcgcatcttgctcaatagccttgcgcactacagacataaagttatcgtcgtacttatagattgttacaccaatgcgagtatcagcagcgtgtgcagcggcaccgaataacatgctggccatcacagcagacagggttaacaccttcttattcatggtatctccggtttttcttatgcagggtagtgcttgagataaatgctcggcggggcagtagagttaatgaagtgttactgaacgccgaagctcactttttaaaattcgttcttccatgcccggtaacgctccagaaaacggctttaattgttgttatgacgctgttacctcggcaaaagtgattattcactgttacatacgggttacaacgttaaaacggtgcaatcatagctatcacattgttaagatactgtgaaatcactcacagattgaaagcggttacatcgcctgatttgtactgttagtgatcgccgccgcattctggcgtgttgcgacagaatggcgacgcactaacgtcggcataaaacagtggctggcacgaggatcaatattgcctgctgccccctgcaaggccagttcggtggctaatttcgccatactagcaatgggataacgcacggtcgttaattgcgggtcggtgtaacgggcgatgggaatatcatcgaaaccgatgatactgagatgtaacggaatcgcaatgccattatcttttaatgctgtcagtgcgccagcggccatattgtcgttataagcaaatacagcggtaagttgtagattgcgccccagcagttcaaccatcgccgcctcaccgcccggcatgtccggcgtaccagcgccaatccagctttccggcggaataatatcctgctctttcaacgcactcatccagcctgctttacgcatggcgtcatcttcaatgccgtggctggaagaaagataaccaatacgttgatgaccgttattcagcaacatgcgcgtcgccattcgggcaccgctgagattatccaggcaaacgcaacgatgggcgtaccccggcacaacgcggttgattaacaccataccgggaatgttatccataaattgcgccagttcatcgtcactcaatgctttactgtgaacaatcaacgcattacaacgctggcgaattaacacctcaatggcgtgacgctctttttccgcttcatgatagctattgccgattagcacgtatttctgatgctgctgagcgaccagatccaccgcttttaccagcgcgccgaaaaacgcatcagaaacgtccatcaccaccacgccaatggtgtcgctaacctgagttgccagcgcctgggcattggcgtttggccgataatccagctcactcacggctttcattactgcttcacgcgtgtcggcactgaccagcgtgctgttattgagcacccgggaaaccgttgccacagagacgccagcctgacgcgctacatcacgaatggtgatcatattcactacctgttatgagattgcagtaaatgactgcttgctggcggctattttgtcagcactgaatacaggacttcgtgaatcgagtcacagcaatggaaacggttacagccgttttgttaacgaatgtgatccagatcgttatctacttgttttagatattgccggtccggcagcacgcaaagttaactgacgccagagccattccaccggcccctggcggaagtaacgcagccagataacagagaagaggatattcgccagccataccggaataacaaacgccagcagctccaggcggtcaaaatgcataaacaaaccgaggtggtaaaaaagcgtggtacaaatcagcgtttgcaatagatagttggtcagcgccatccgtccgacgcaggcgatcgcaagcaccagcttaaagcggctcaattgcggccagaagccataaaacaggctcgcatagccaatcgcctgaaacggcgcactcagttcccgcggcatttgaagtaagaaggcacaccagcgatacgcccagtccagctgccattgcagggcgatggcaggaaggttaatggtcaccccaatcgccaccagcacaaaaccagtacgacgatagtgacgtaagctgaactgccctttcagccagccgctgcgcatcagcgccgcaccaatgagcatcatccctgccagttgccagccatactgtgcgcccagtgccagtaaactgttgccaacaccatcggcacgattactgatcgcttcaacgccgccgtgaagcttccagtatttttcatacaaaatagcgcttgcatccggcgtccaggcgcggctggtctggctgtcggaaatcagccccaataacagcaaaacgccaagccccaccagataaagcatgacgcctgtattaaacaggctttttacgcttggcgcatcgcgcaccagccgccagcagattaagcccaccagcccgtaagccagcaaaatatcgccgtcccagaacaataaaccgtgaataaagcccaacaagactaacagcgttaaccggctctggatccagcgtctgccacggggcagcaacatttgcaggcccgcaccaaacagtagcgcaaaaagcgtgaggaatttcacctggccgatgagatcaagaaatgcccaagtccatgcatcccgcggcgtaatagcaccgtaccaggcgggattgagataagccgcctttggtagcccaaaggcgctgatgtttaatagcaggatccccagaatggcgacgccgcgaacaaaatcgagcgtgacgttgcgctccatggttcctgccttttaatcagttgtgatgacgcacagcgcgcagaaactcgtggcgcgtattctgactggatttgaacaatccaccaagagaggtcgttgtcgtggcactggttgcatcgcggatgccacgcgccttcacgcagtaatgcaccgcgtcgatgctgacagccacgttattggtgcccagcagcgtttgtagcgcaataagaatttgctgcgtcagacgttcctgcacctgcggacgctgggcaaagaactgcacaatgcggttaattttactcagaccgatcacgctatctttcgggatataggccaccgtcgctttgccatcgatggtaacaaaatggtgttcacaggtgctggtcagagtgatatcgcgcacggtgaccatttcatcgaccttcattttgttttcaatgagggtgattttcgggaaattggcgtaatccagaccggagaaaatttcatcgacatacattttagcgatgcgatgcggcgtttccatcaaactgtcatcagccaggtcgagattcagcagctgcatgatttcggtcatatgaccagcaataaggcttttgcgcgtttcgttatccatttcatgcacgggcgggcgcagcggtgtttccagtcctcgcgcaactaacgcttcatgaaccagggccgcttctttactgagacttggcatttatgatttctcctgcaggtgtgacgcctccgccctgcgtgggggcaaagttattaagctgatttacagcctgattattgtgcgtgaggcggcgcacataatccagtattcacagcgataattattgtaattgccgctgcctttcatcagcagatgttaaaacatcgttatgcaaatacggaagtgaaagttactcacagcacattgaataaacggtatgatgaagaaattgcaaacaacacaacaaggagccacgcatggaaatgctcgaagagcaccgctgttttgaaggctggcagcaacgctggcgacacgactccagtaccttaaactgcccgatgacgttcagtatctttctccctccacctcgtgatcacactccgccaccagtgctgtactggctttccggattaacctgcaatgacgagaacttcaccaccaaggcgggtgcccagcgggtagcggcggaactggggattgtactggtgatgccagacaccagcccgcgcggcgaaaaggttgccaacgacgatggctacgatttaggccagggcgcaggcttttatcttaatgccacgcaaccgccgtgggcgacgcattaccggatgtatgattatctgcgcgatgaattaccggcgctggttcagagccaatttaatgtcagcgaccgctgcgccattagcggtcacagtatgggtggtcacggtgcgctgattatggcgctgaaaaatccgggtaaatacaccagcgttagcgcctttgcgccaattgtgaatccgtgcagcgtcccgtggggaatcaaagcgtttagcagctatttaggtgaggacaaaaatgcatggctggaatgggacagttgcgcactgatgtatgccagtaacgcgcaggatgcgatcccgacgcttatcgatcagggcgataatgatcagtttcttgccgaccagttgcaacctgcggtactggcagaagccgcgcgccagaaagcgtggccgatgacgctgcgtattcagccgggatatgatcacagttactacttcatcgcctcttttatagaggatcacctgcgcttccatgcgcagtatttactgaagtgaaagtccgcccggttcgccgggcatcttctcatcagaagcgataatccactgccataaagtaacgacgtccgtcttcgttatagctgtagtcgtcacgactgagatccttgtcgccaaggttcagcacgcctgcgcgcagtttgacgtctttagtcacctgccaggccgcgccggtattccagatggtataaccgcccggtgttttagccgtcgcgctgtcggcgcgtttctgcccggtatagtgcccagaaacatagaaactccagtcttccagcgccagcggtttccagtccagcgtaccgttagcagtatggaacggcagatcggatagcggtttgttttcgccgttgctgacatcacgaccatcgttgtaggtgtagttgatgctcagtttccattcatcgttgaacggaattttcagttcggtttccacgccctgaatacgagctttgttaacgttgtagtagctaaataccggtatgcgccgtccgttagcgcccgtctcaaaaccaacaaagttttggtagcccggtgcagcgttgacgtcagacgtacggctgatgctgatacgatctttcacatcgttacggaaaacggtaacgctggattcaaccccttccagccagccttcttcacccatgtagtaaagccccagctcccaactttcgctggtttctggtttcagatccgggctacccacaatcttacatgcgccacggcaggaattgctcgtccagtcagggctaagttgcaacagagaaggtgctttaaatgccgtcgcccagccccctttcaccgttacggtgtcggtggcgttataaaccaggtaggcacgcggactccagtgttcaccgtaggtttcgtgatcgtccatacgcacgccggtcgtcagcgccagcggctcgaagatccgccattcatcttccacaaacagcgcgtactggctggcagacgttttggagctggttcccccggtcaggttcaccgcatcgctaagtttgtcgtgacgccattcaccgccaaccgtgagaaactgattaatcgccgtcagcggcaacgtgtatttgccgtcgaccgtattgctttcggaagttatcgggctgctgttgccagggtttttgttctcgactttctcaccgtagtatttcagttcgctggtgccgtaatcccaacgcccattatggctgacggagtagttctggcgttccaggcggtttttgtccaggctgtcggaatcacgatcctgacggtcgaaaccgtatccggcagtaaaatcgtgattttgattcggtgtccaggcaaattcgacattgccgtcgcggctggagaatccttcaatacgcggcgtttctccggtatcggtggtcgtactgttttgcgggtcatccttttcacgttttgccaggctgccgtaagctttcattcccagcacaccatcaattaatggtccactggtaaagaactgaccgttataggtgtcaccgcgatcgcgatgttcctgaatggtggtatcgacggtaacggtaccgctccatttctgaccgatttttttggtgatgatattcactacaccgccgagcgcatcggaaccgtacaggctgctcatcgggccacggaccacttcaatacgttcgatggaatcgaccgggatccagttcagatcgaaatcattgtggcggaagacggcattgcgggagttcacgcgtttaccgtcgacgagaatcagggtatagctgctgtccagaccacgaatactaacgcccttacggttatccccttcgttcgtcagttgtacgccaggcacttctttgaggacatccttcagattctgtaccggttttcgctgcaggtcttcctgggtaatgacgctgatactggcaggtgcatctttaagattttgttccacggaagatgcagtgacaaccatcgtttcgccatcatcatcgaccgctaacacaggccatgcacaagaaatagcggacaaacacagcccgacccgtacgaaagggttcaacctaaacattccatatctccatgaggtaactacgaaaataaaatgggttatcgctcacatcttcttcacgtccccttgcgtacggcagcatcgcggtggacttattttttatgcaggtgatcatcccagaaagccggaacagcctctgatttgtcagccttttttgattgcggcgtaacgataatgcaaacgataacaattatcaatccaaatgttaaattttatatccgcatgatttgtcagggaaatggaattgaaaaagccctctcggttgagagggcttagcaaggaagggaggaaacttatttcttatcgttctgcgggaacttcatttcgctgtagcgtacgaagtgagttcctttaatcagcttgtagccgaaccaaataatcaggaacagcgggataccaatatacgttgccgctacgccgccccagtcaatagtatctttcaggaacgcttcgtagttctggcccaaagtgataatcagacacagaatgaatgcgaagatcggccccagtgggaagaaaccactacggtacggcagatcgttaatgtcgtgtccctgcaatacgtaaccgcgacggaagcgatagtggctaatggcaatccccagccaggcgataaaacccgtcatcccggaggtgttcagcagccacaggtataccgtctggttgccaaacatggaggtcaggaagcacagaccggcaatcaccgtcgtcgcatacagcgcattacgcggcacgccaccacggctcagtttagcgaaaatgcgcggcgctttaccgtcacacgccagggtgtacagcatacgagtagacgcatacataccggagttacccgcactcagcaccgccgtcagaataactgcgttcatcaccgccgccgcagagagcagacccgcgtgctggaacaccagggtgaacggactaacgctgatgtctttaacatcgttacgcagcaggctcggatcggtgtacggaataatcaggctgataatcaggatcgcgaacacatagaacaacaggattcgccagaacacctgacgtaccgcgcgtggaatgtttttcgccggatcttcggactcgcctgcagcaataccgatcagctcggttccctggaaagagaagccgacaatcatagctacgccgatcatcgccgcaaaaccaccagcaaacggcgcttcgccgattgtccagttgctccagcccgcaggctgcgcgcctttgaagataccgataatcatcagcacgccaacgatgataaagacaataactgtcgtgactttgatcagactgaaccagtattccgcttcaccaaagccacgaacactgatgtagttcagcaggaagataacgccgaggaacaacgcactccagatccagcccggtgtatccgggaaccaccagctcatgaccagctgagctgcaaccaggtcaacggcgatagtcaccgcccagttgtaccagtagttccagcccagcgcgaagccaaagccttcttcaacatagttctgaccgtaagtggcaaagctaccggaaaccggcatatatgcagccagttcaccgagactggtcatcaggaagtaaaccatcaggccaatcagcatatagctgagcaatgccccgcccggacctgcctgagaaatcgttgcgccagaggcaacaaaaagacctgtaccgatggaaccgccaatggcaatcatcgtcaggtgacgcgcctttaattcacggcgtaagcccggcgcttctgtggttttagtttcggaaaccatacaaaaatgctatccatcttaaaaatgaggcgcgattgtagcagacgattggcaatccttccggcagaaatacacggttataagacaccttcatgatcgcccagggattataagtaaagcagccaatctcttttctggcgaatgcatgctgaaggcgctgcgtcacgaaatcgacacagcaccagcatgttcttgtacagcaacttaacgcggcacatttgcgggatcgcaatagtccagaaagcgccgtagcgcgttggaaaggtgtttttgccgatgatgtatacgccacaacgtacgcatcaggcgcggcagagggaccgcaacttcacttaatgtgcctgcctgcaattgatcttcaatcacacgtcggctcaggcaactaattcccaacccatgacgcaccgcatgtttgattgcctcggagttacctaattccatcgccatctcaaacttcggtaaatgactcagcaacagataatcgacaatctcccgcgtgccggaaccgcgttcacgcaggatccacggcgcagcggccagctgttctaaggtgaccggaccacgggccaacgggctagtcggcgcggcgaaaaccaccagctcgtcttccagccacggttcagaaatgatttcagtgctgtggcacggtccttcaataaagccaatatcaacgcggaaatccagcaccgcttgcatcacgtcctggctattcccaacgctaagttcaatcggcaactgcggataatcatggcgataacgggcgataactgcaggcagaatgtagttaccgatggtactactggcatagatacgaatcgcgccgttgtcttcgcgaaacagttgttcgatttcaaccgcctgttcaagcaatgccaacgcacgcggatagagcagccgcccgtgttcattaacaaccagtcttttccccacgcgatcaaacagttgcacgccaagctgcccttccaggtcggtcaaggctgcgctcactgcactttggctcaacgccagcatcacgctcgcctgggtggtacttccacttttcaatacttctgcaaaaacttccaactgccggagggtgatgtgcatagtcgcttaccacttataaagattaattataaatatataatcaattttatttttaaaccagttagtcgtaaccttatgcccggttaaaggagagggttatgacgaatatcaccttacagaaacaacatcgtacactgtggcattttattccggggttagccctgagtgcagttatcaccggggtcgccctgtggggtggttccattcccgcggttgcgggtgccgggtttagtgccctcaccctcgcaatcttgttggggatggttttaggcaacaccatctatccgcacatctggaaaagctgtgacggtggtgtgctgtttgccaagcaatatttattacgtctgggtatcattctttatggcttccgtctgacgttcagccaaattgccgatgtcggtatcagtgggatcatcattgacgtgttgacgctgtccagtaccttcctgctggcttgcttcctggggcagaaagtgtttggtctggataagcacaccagctggttgatcggtgccggtagcagtatctgtggtgctgccgcggtactggcgactgagccggtagtgaaagcggaagccagtaaagtaaccgtggctgttgcaaccgttgttatcttcgggaccgtcgcgattttcctctacccggcgatatatccgctgatgtctcaatggtttagtccggaaactttcggtatctacattggttctactgtgcacgaagtggcgcaggtggtggcggcaggtcatgccatcagcccggatgcggaaaacgcagcagttatttccaaaatgctgcgcgtgatgatgctggctccgttcctcatcctgctggcggcgcgtgttaaacagctgtctggggcgaacagcggcgagaaaagcaaaatcactattccgtggtttgccatcttgttcatcgtagttgccatctttaacagcttccacctgttaccgcagagcgtggtgaacatgctggtaacgctggataccttcctgctggcaatggcgatggcggcgctgggtctgaccactcacgtcagcgcgctgaaaaaagctggggcgaaacctctgctgatggcactggtactgtttgcctggctgattgttggtggtggtgcgattaactatgtgattcaaagcgtcatcgcataaaccactacatcttgctcctgttaacccgctatcattaccgttttcctccagcgggtttaacaggagtcctcgcatgaaatacattggagcgcacgttagtgctgctggcggtctggcaaatgccgcaattcgcgccgccgaaatcgacgcaaccgcgtttgccttgttcaccaaaaaccaacgtcagtggcgtgccgcaccgctcacgacgcaaaccatcgatgaattcaaagccgcctgtgaaaaatatcactacacaagcgcgcaaattcttccccacgacagttatctgattaacctcggacatccggtcactgaagctctggaaaaaagccgcgatgcctttatagatgaaatgcagcgttgcgaacagctggggctttctttgctcaacttccaccctggcagccatctgatgcagattagtgaagaggattgccttgcgcgtattgccgaatccatcaacattgcgctggataaaactcaaggtgtgacagcggtgatagaaaacaccgccggtcagggcagtaacttagggtttaaattcgaacatctcgcggcgattatcgacggcgtggaagataaatcccgcgtcggcgtctgcattgatacctgccatgctttcgctgccgggtatgatttgcgtactccagccgaatgcgagaaaacattcgcggattttgcccgtactgtcggctttaagtatctgcgcgggatgcaccttaacgatgcgaaaagcacctttggcagccgcgttgaccgccatcatagcctcggtgaaggcaatatcggtcatgatgcgttccgctggatcatgcaggacgaccgtttcgacggcattccgctgatcctcgaaaccatcaacccggatatctgggcagaagagatcgcctggctgaaagcgcaacaaactgaaaaagcggtagcctgaagatgaataaccgggaaaaggagatccttgcaattttacggcgtaacccgctgattcagcagaacgaaattgcggacatgctgcaaatcagccgtagccgcgttgcggcgcatattatggatttaatgcgcaaaggccggattaaaggcaaaggttacattctcaccgagcaggaatactgcgtagtggtggggacaatcaatatggatattcgcgggatggcggatatccgttacccgcaaagcgcttctcatcccggtacaattcattgcagtgcgggcggcgtgggacgcaacatcgcccacaatctggcgctgttaggccgtgacgtccatttgcttagtgtgattggcgatgacttttatggcgaaatgctcctggaagaaacgcgccgtgccggcgtgaatgtctccggctgcgttcgtttgcatggtcaaagcacaagcacgtatctggcaattgccaatcgagacgatcaaaccgtgctggcgattaacgatacccatctgctggaacagttgacaccgcaactactgaacgggagccgcgatttacttcgtcatgcgggcgtggtactggctgattgcaacctgacagccgaggcgctggaatgggtctttaccctcgctgatgaaatcccggtgtttgtcgataccgttagtgaattcaaagcgggcaaaatcaaacactggctggcgcatattcacaccctgaaacccactttaccggagctggaaattttatggggacaggcgatcaccagcgatgctgaccgtaataccgcagtgaatgcattgcatcagcaaggtgttcagcaactgtttgtttatttgcccgatgagagtgtttattgcagcgaaaaggatggagaacaatttttgctgaccgcgccagcgcatacgacagtagacagttttggtgctgacgatggttttatggcgggcctggtatatagctttcttgaaggatacagtttccgcgacagcgcccgttttgcggtagcctgcgcggcaattagccgcgccagcggcagcttaaacaaccctaccctgtctgccgataacgcgcttagtttagtgccaatggtgtaacaatgttgccggatgcgacgcttaacgcgtcttatccggcctacaaatcaggcaatttcagcaagtaaatgtaggcctgataagcttgcgcatcaggcaatgacactcaagctaaaccaataaagaacccggcaatggtcgcactcatcaagttggaaagcgtcgccgccgccagcgcccgtaaaccaagctgggcgatttccggcgcacggtgtggcgcaaccgcagaaaacgcccccaccaccaccccgatagaaccaaagttagcgaaaccgcacaacgcgaaggaaataatcgccacagttttagcatcgagagtgccagccgtttgcagatagggactgaaattgagataagcgacaaattcatttattgccagtttctgtccaatcaaactcccggcaagattcgcatcactccagtccacacccatcacccacgccagtggagccagcaggtaacctaaaatggactccaggctggcatgttcaaaaccaaaccagccaccaacgccgccgataataccgttaatcaacgcaattattgcaacaaatgccatcaccactgttgccacacctgcggcgattttcagcccggtcattgcccctgtcgcagcggcttcaataatgctttttggcggtgtttcggtgaaagagaggttattaaaggaaacctggctagattccgttgccgggcttaacaggcgggcaaacaagatcccgccagggatcgccattaaacttgccgccagcagatattccacaggcacgcccagtgcggcgtaaccaatcattgtgctaccagcaatgctggccatgccactacaaatcgctgtaaataattcattgcgattcagacgatcgataaagggtttgacgattgccggaatttcgttttgcccgaggaaaatggtggtgaccgcgacgaaactctcgatcttgctgatatttaatgctttctggaagataccgccgagaattcgaattaaaatccccatcacaccgatgtagtagagaatactcaccagcgcggtgacgaagataattgccggtaacaccctgaaaccaaagataaatcctgcaccatcaaataaggtatccattttcggtccgaccagagaaccgaagataaatgcgctacccgcgtcgctgtacgccatcactttatgcacgccaaaagcgactttttcagcgacccaacgccctggcggtaaccaaagcataatgccgccaatcacgacctgtaacactaacgccgcgccaacggtacgcaggctgatcttcttcttgtttacactcagtaaaaacgcaatcgtcagcaataccaccattcccagaacacttctcatgacatccatagtgattatctcttcatgtcatattgggcgacggctttctgcccatcagaaatagccaggcctgcatcttgcgataccggcccggcttgttatcaacacttaatgggttttgatgtagccgcgcacgcactcttcgactaatccccagaaccagtctgtatcaatagtgatgccgactttggtattggcgggcttgccaagaacgcccagctcgtcgcagacggtacgcccatagcaagggccactgttgacgtccacttcgacgtacatctcctgggttttaatgccatcagggttaatcagataaccgatgcaggtggcgtcgtgcaccgggccgccagcaaggccgtagttttcgaactgcgttttgagagtgaagttcatgatgtcgctgaacagctctccggcggggccgcctgccctttccatccgagcaatcacgtccggggtgcaaacggtctggttggtgagatcgaggcccatcatcactaatggaacgccggaggtgaacactacgcgtgcggcttccgggtcggcaaagatgttgaactcggcagatggcgtgaagttgcctgtaccgtaagcgccgcccattagcacaatttcacggattttgggcaggatcgcgggttgcatacgcattgccaccgcgatattactaagcggaccaaccggcaccagagtgatatcgccatcgcttgccatcagggtatcaatgatatatttcaccgcatgagtgctttctgcctggcgggtcagcggctcgaataccgggccatccagtccggtttcaccgtgaatattatcggcaacgatttgttgacgcataatgggctgcggcatccccgcataaaccggaacattaatctccagtttctggcaaacattcaggccattaattaatgttttatcaagcgtctgattacccgctacaatagtgatgcctaataaatctattgccggatgtttcgccgccatcattatagcaatagcatcatcatgacccggatcacaatccagaataatttttctcttttccattgtttatttcctctgtttccagttgcgttattttttctacagcaaagaaaattcgaccgggccgatgattgaatcttaacaacagcgtacgtatgctaaatatgagaaatctcatagcggataaacatcgtgaaagaaatccacaataatgatcttaagcagcaattgatgagtgaatccgcgtttaaggattgctttttaacggatgttagtgccgatacgcggctgtttcattttttagcgcgtgactacattgtgcaggaagggcaacagccgtcctggctgttttacctgacgcgaggccgcgccaggctttacgccacgctagctaatggtcgcgtgagcctgatcgatttctttgccgccccctgttttattggcgagattgagttaatcgataaagaccatgaaccgcgtgcggtgcaggctattgaagagtgttggtgccttgcgctccctatgaaacattaccgtccgctgttattaaacgacacgctatttttacgaaaactctgcgtcaccttaagtcataaaaattatcgtaatattgtttctttaactcagaatcaaagttttccgttagtgaatcgcctggcagcatttatattactcagccaggaaggtgatctttatcacgaaaagcatacgcaagcggcagagtatttaggcgtttcttatcgacatcttttatatgttctcgcgcagttcattcacgacggtttattaattaaaagcaagaaagggtatctcattaaaaacagaaagcagttgagtggactggcgctggagatggacccggagaataaattctccgggatgatgcagtaaaaattattttcaatagcgcgattgccggatgcaacgcttaatacgttttatccggtctacaaatcgagcattacgccagaccaataaagaacccggcaatagtcgcactcatcaggttggaaagcgttgctgctgccagcgcccgtaaaccaagctgggcgatttccggcgcgcgttttgggctaatagcgctaaatgcgccaacgacaacaccgatagaaccaaagttagcaaaaccacaaagcgcaaaggagataatcgcaatggttttcacttccagcgtgccgcccgtttgcaggtatggggagaaactcaggtaagcgacgaattcgttaatcgccagtttctgcccaatcaggctacccgcaagattggcatcactccagtccacacccatgatccacgccagcggtgccagcacatagccaaaaatactttccagagaggcattggcgaaaccaaaccagccgccaattccgccgataatgccgttgatcagcgcaataattgcgacaaacgccattaccaccgtcgccacaccagcggcgatttttagcccggtcatcgcaccgctcgccgccgcttcgataaagctttttggcggcgtttcgctgaagctcagattttcaaatgtgacctggctaggctcggttgccgggctaagaatacgtgcaaacaaaatcccgccagggatcgccatcaggcttgccgctaacaggtagtcaattggtacgcccattccggcataaccaatcatcatgctaccagcaatggacgccatcccgctacaaattgcggtaaacaactcgttgcgattcatgcgatcgataaacggtttaacgatcgccgggatctcattttgcccgaggaaaatagtagtaaccgcaacaaaagattcgattttgctgatgttgagggctttctggaaaatgctgccaaggatgcgaatcagcagccccatcacgccaatgtagtacagcagactgatgagcgcagtaacgaaaataatcgccggaagtacgcgaaaggcgaagataaaacccgcaccgtcaaacaggacatccattttcggcccaaccaggctaccaaaaatgaaggcgctaccggcatcactgtaagacatcactttatgaacgcctaatgccgcctgttctactgcccattttcccggtgggaagtagagcatgatgccaccaatagcgatttgcagcagcagtgcggctccaaccgtgcgcaaactgatgctctttttattcacactcaacagaaatgctattgccagtaacaccaccatccccacaacacttctcattatatccataatgattttcccttcatgccggtaaacccggcgtcagcgccaggttttggtatgcttgatgagtacgggcgacggctttctgcccgtcagaaattaacccgcgagacgctgatattctttggcaatttcgctcgccagaatggcgttgttgaacaccagctggatgttggatttcaggctgtcaccgccggtcagttcagcaacgcgcgccagcaggaatggcgtactttctttaccaatgactccctgagcttcagcttcagctaccgcctgatcgatcgccgcattgatagtgtgttccggcatagcaaactgttccgggatcgggttcgctaccacgaggccaccgttcagaccgctttgccatttcaccaccattgcacgggcaatttcgctggcgctgtcgagacgaatgctgacgtcaaacgggctggtgcggcagaaaaacgcaggcagcgctttagtctgatagccaattaacggcacaccgaaggtttctaaatactcagtggttaatcctaaatcgagaatagatttcgccccggcacaaacaacggtgacattagtatttgccagttcttgcaaatcggcagaaatatcgaaggtatgttccgccccgcgatgcacaccaccaattcccccggtggcaaatactttaattccggcaagcgccgcaataatcatcgtactagccacagtggttgcgccattttttccggcggcaacaacaaaaggtaaatcgcgacgactaactttggtcacgttatgcccttcacgacccagtaattcaatttcttctttgcttaaccccactttcatcacgccgccaataatggcgatcgtggcaggtacagcgccctgtttacgaatagtttcttcaacttcaattgcggtctgggcattttgtgggaacggcatcccgtgagaaataatggtgctttccagcgccacaaccggttttttgttttttaaagcgtcctgcacttccggggaaatttgtaataattcaggggaaatttttaattcagacattctgcgttctccactaagcttataacgttggcaatgcttaaatcggggttattggtgtattcacaggagagcgccatactgctacatccctgtgcgaaacgaacagattcggcaaacggcattccgtctacccaacagctagcaagtcccgccatcatggcatcgcccgctccggtaacattaataacattggttttgatcggcgcagaccagccactttcaccgctgatatcgctgtaataaacgccgtcgccgcccatgctcaataccagtcggttcaggccatgttgatggaaccaggcagcaacttttgccacatcttcacgcccactcagcgcaatcccactcagggtttccgcttcaaggcggtttggcttgagagtgtggatctgatttagacggtcgcgcactttgacacatttccatgcgctaaccggatcgacaaatacgggtacgttggcggcattatccagaatccatgccagtgcctcttcactgatattacagtccgcgacaatgacctttgccctctgaataaattcaccgtgctgtgcgagatattcagctgtaatagcgttgctaatattcatgtcatttatagcaaccagcatttcaccggtattatcgagtaaacttaaataactgctcgtattttctcccggcacaatcaggcatttatcgacataaacgccagattgattggtttgcgttagcaggctttgaccataaaaatcactgcctacggcgctcagtagccaggctttgttacccagcaacgccaggttttgtgcaatattgcgccctactccaccaggcgtaaattttattttacctggattactatccgcataatttaaactttcatgactatatccggcgacatcaatattcgcgctacctataattacgacataatccttttcgcgcatagcacgtcctctggtaaaaaattaccaaccctgtcaatccacaagaatatagatactgcaaagacggtttaaacatgtgttcatatttaaacatgtgctcatagtatgcatgttttacgtaaagtaaattaccgccagagaggcaaaatgggcagatttgagcaggctcacaaaatgcgattaaatgcctgaattacaaaagcgaggaatttgtgacgggatgcacagaacagaacaataaaaaagggcagaaaataatctgcccttgaggaaataacctgagtgtttgatgaacgtttgaagtttctactgaaagataaaaccatttaaattcataaaattacattcacaaaccggtcattctctttgcgctcatcaaatgttacaggacaggaaatttctgccctgtaacacaccttttattacgctgctttcgctactgcgtccacttccggacgtttcaggaaggcataggccaaacccgccaccagcgtaccggcaataattgctaccaggtaacccaataccggcgtaatagcgccagggatcagcagaacaaacagaccaccgtgcggtgccatcagtttcgcaccaatcgccatactgattgcgccagtcagcgccccacccacgatacagcacggcagcacacgcatcggatcacgagcagcaaacggaattgcaccttcgctaatgaagcacagtcccaataccagagcggctttgccaccttcctgctgcgctttgtcgaatttgcgacgcgccaccattgttgccagacccattgccagcggtggcaccatacctgccgccataatcgccgccatcgggccataggtttgagtactcagcagacccacaccgaatgcgtacgctgctttgtttaccggaccgcccatgtcagtacacatcatgccaccgaggatcgcccccagcagaaccgcattcgcagtccccatggtctgcagccagtgagtcagcccttcgagaatgccagcaactggtttaccgatcaggtagatcatcgccagaccgaccaccagactggaaattagcggaatgatcaggatcggtttcagcgcctccatactctgtggcagtttcaattgcgtactgattaacttcgcaatgtaaccagccaggaagcccgcaataataccaccaatgaagccagaaccggtgctgaccgccagcataccgccaatcagacccggagtgaggcccggacgatcggcaatggaaaaggcaatataacctgccagtaccggcaccatcagcgcaaaggcactaccaccaccaatctgcatcagcgccgcagccaacgtacccggctctttaaacgcttcgataccaaaagcaaaagaaagcgcgatacacagaccacctgcaacgaccatcggcagcatgtaagaaacgcccgtcagcaagtgacggtatgcgcctgcactctctttcttactttcagtggtcgccgtttgagctttgcccgccggttcatacggcgttgcttcagcaaccgctttatccagttcctgcgcggttttcttcagcgccagaccggtagaggtacgatacatcggtttaccagcaaatttcgccagatccacttcgatatctgccgccacaatcaccagatccgctgctgcgacttcttcgggagtgattgcattacccgcgccaacagaaccacgggtttcaactttcacccaccagccacgttttttcgcttcggtttcaatggcttcagccgccataaaggtgtgtgctacgccagtcgggcaagcagtcaccgcaactacgcgtttcggaccgctggcggcaactggtgctgtcgcagcgaccggcgcagtgtaaggtttcgcatggcctttggcttcactcaggaacagctcagggtgcgcaactgcccgggaaatatcgcccagccagacatttttaccgttcagcgcgctgtcgttcgggatggaatcaccgagaacaatcgccatttcagcgtcgttcggattgtcgatgatttccagttttgcttttcgcgccgccgcgcccagcagggtcttcgccatataggcgcgtgcctgaccgagattagcgtcaataatcagcagcgttttcattatgcctctcctgctgtcagttaaaaggttgtaagtcgacgcgcgccatcattgcggccaactgcggacgatcggtaatacccacattgctttgacttaccgccagggctgcaacagctgtcgccagacgcagtgtgtgttcactggattcacgcatcagcaagccataaatcaggccaccaaccatagaatcccctgcgccaacggtgcttacgacatcgacactcggtggtttggcgatccattcgccggaggcattaacccaaagcgcgccttcggcacccagactaataacaacatgcgcgatgccttgttcacgtagcgcatgtgcagcttcaatcacatctttcatttcaggcagtttacggcctgcccagatttccagctcgcggcggttaggtttcaccagccacggtgccgctttcaaacctgctactaacgcttcacggctactatcaaagataatgcaaggacactgactacgcaggcgagtcatccagtcggtgaacgcttccgggctgacgccactcggtaagcttccgctgacacagaccatatcgaactgaccgagccagctcagagaatcagtcacaaagcgttcccagtcggcgggggtgacttcaaaaccgctgaagttgaagtcggtcacttcgccgtctttttccgtcagcttaacgttaattcgggtgcgcccctgtacaacctggaaacggttggcaatgcccagctcgctgaacagttgctgaaaaccatcctgattgtctttacccaggaagccgccaacggtgacatcaattcccaggtcttttaatactttggccacgttgatgcctttacccgccgcatgcagaccggtggttttcaccaggttcacttcgccgcgttcaatttccgggcagaaaccaacaaggtcataagccggattaagggtgatagtagcaacacgtctgctcattatgcgccctccccaagaccagcagcgatagcgtcgccgattgctttcagcgcctgttcagcatctgcaccctgggcggtaaagcgtaggcgatgacctttcttaacgccaagtgccacaactttcatcagactacgtccgtttgccggtttgccggtaccatcaaggtttgtcacggtaatatcactgttaaattgtttaatggtattgaccagcatggtacctggacgagcatgcaggccgtgttcattgcgcaccacaaactccgcgcttaacacgtcgtcggtcggcgcatcatcgctggtcagcagcgccagcaacgttgccgcatccgctttcagcaagcggtcagctttattgtcgagcaataaatcagcgagacgcttaagaaccgcgatgggctgatcgtcattcatcgccacactcaccagcatggctgccgtttcgccgtccacatcaaaagcatttgccgcacggcttaccgcaatcgcgctacgcagattgccttcggcgctatcgctcagccagataccctgtccgagattcagcggttgttcattgatggctttggtgacgaaagtggcgtcaactgcccccgcctctttcagacgcgcagcgttcagcgcctgaagagtcagcagatcgctggcgacgatatccagtgtcagcatttcgttgtcgagcttcagctgctcactctgcttttcgcccatcagtaatgcgcgaagttcttctgctgttgttgcactcttcagttgttcagcaacggaatcatcgctcagtacgtgggtcagctggcgtagcaggcccagatgttcatcgctgctggcagcaataccgattgccacgtacgctacctgaccgtcaccccaggtgacgccttccgggaactgaaatacctgaacgccggttttcagcacctgatcgcgggtgtcggtagtgccgtgtggaatagcaataccattgccgaggaacgtactggtttgctgttcgcgcgccagcatgccattgacgtagccttctgctacattaccggcctgcaccagcgccgcagcgacctggcgaatcgcctcttctttgtctccggccttttcgcccggatggatgtcctgtacggataactggaacatagttctcctctcttgctgaattgaaacgattcagcctctatgagaaaaaaagcgccaacctggcttagggttaaagacaagatcgcgctgaaacgtttcaagaaagcataatacttctgtttcagcacgcaaggaaagccgtaaagttatgagcaaaagtttgatgtgctgcacaattttttgccatttttcctaattgctgatgggaaaatccgttatcagcaatttcatttcagcagcgtcagcagccaatcagcaacagtgaaatggcattttgactattcgtggcgcttttgatttcgctgtctgtttattttctgacaagcagcgtaaactccgcgtcttcctcttccagtgatcgaccagcatgcataactcccccgcagtctccagcgcgaaaagctttgacctgaccagcacggcgtttttaatcgttgcctttctcaccggtattgcgggcgctctgcaaaccccgacactcagtatttttcttaccgatgaagtacatgcccgtccggcgatggtgggattcttctttaccggcagcgctgtcattgggattctggtaagtcagtttctcgccgggcgctctgataagcgcggcgatcgcaaaagcctgattgtcttttgctgcctgttaggcgtgctggcctgcaccctttttgcctggaatcgcaactactttgttttgctattcgttggcgtctttcttagcagctttggcagcaccgctaacccgcaaatgtttgcccttgcccgtgaacatgccgacaaaaccggacgtgaggcggtgatgttcagctcttttttacgcgctcaggttagtctggcatgggtcattggcccaccgctggcttatgccttagcgatgggtttcagctttacggtaatgtatctgagcgcagcggtagcgtttattgtttgcggtgtgatggtgtggctgtttttaccgagcatgcgaaaagagcttccgctggcgaccggcacgatcgaagcgccgcgccgtaaccgtcgcgatacgctgctgctgtttgtcatttgtacattgatgtggggcagcaacagcctgtacatcatcaacatgccgctatttattatcaacgaactgcatcttcccgagaaactggccggtgtgatgatggggaccgccgccgggctggaaatcccgacgatgttgattgccggatatttcgccaaacgtctgggtaagcgtttcttaatgcgcgttgctgccgtgggtggcgtctgtttttacgcaggaatgctgatggcgcatagtcctgtcattctgttgggcttgcagctgctaaatgctatttttattggcattctgggcggcatcgggatgctctattttcaggatctgatgcccggtcaggcgggtagtgccaccacgctctataccaacactagccgcgtgggctggatcatcgcaggaagtgtggcgggcatcgtcgccgagatctggaattatcacgctgtgttctggtttgcgatggtgatgattatcgccactctgttttgcttactgcggattaaagatgtttaaggcgcggtcagcatttccagatcgataagccaggtcatggcctgctgacggctgttaccgcacatttcagcgctggcttgtaagcctgcacagactttcggtcgcagtgggctggtgaaaattttacagcgttgctgttcatcaagctgaatgcagggcgtattggcgggcttgccatctggcataccgggaatagggctggaaatactaggggcagtgcaacacgccccgcaacccggacggcattccatacgttgttctcttaaggttaaccaccggattgatgagcgcgcacagtaccaccttttttgcaccagcaaaagtgcgaataccacttgcccgaaaggcccgtcgcgagtactttgtcgcgatatttttgacattttcgactacaggaatttttcgatgccaagagcgaacgaaattaaaaaaggtatggtactgaattacaacggcaaactgctgctggttaaggatattgatattcagagccccactgcccgcggtgccgctacgctgtacaaaatgcgtttttctgatgtccgtaccgggctgaaagtagaagagcgtttcaaaggtgatgatatcgttgacaccgtgacgctgacccgccgttacgttgacttctcctatgtcgatggcaacgaatatgtctttatggataaagaagactataccccgtataccttcaccaaagatcagattgaagaagagttgctgtttatgccagagggcggcatgccggacatgcaggtgctgacctgggacggtcaactgctggcgcttgagctgccgcagaccgttgatctggaaatcgttgaaaccgcaccaggcatcaaaggggcatctgccagcgcccgtaacaaaccggcgacattgagcactggtctggtgattcaggtaccagaatacttaagcccgggcgaaaaaattcgtatccatatcgaagaacgccgttatatggggcgtgctgactaacttcagccgcatgcagaaaagggatagctcaggctgtcccttttttaatttattataccaatcttctattttgcgcttcctgaacaccttacgccctcaattttcactcgttgattgatcgccctcacacttcatcgcattaacaatccagaccaatttcaattgctgtcatataactttacactgtcgttgttaattaatcgttactaagacgtgactcctatgaatacaatcgcctccgttacgctcccgcatcatgtacacgctccacgctatgatcgccagcagttgcaaagtcgtatcgttcattttggctttggagcctttcaccgcgctcatcaggcgttactgaccgatcgtgtgctgaatgcccagggcggcgactgggggatctgtgaaatcagcttgttcagcggtgatcaactgatgagccagctccgcgcacagaaccatttatataccgtgctggagaaaggtgcggacggcaatcaggtgataattgtcggtgccgttcacgaatgccttaatgcaaaactggattccttagcggcaattattgagaaattttgcgagccacaggtggcaattgtttccctgacgattaccgaaaaaggctattgtattgacccggccaccggtgcactcgacaccagtaatccgcggattattcacgatctacaaacccctgaagaacctcactccgcaccgggtattctcgtcgaagcactgaaacgccgccgtgagcgcggccttacaccgtttaccgtgctctcctgcgacaatattcccgacaatggtcatgtggtgaaaaacgcggtgctgggaatggcagaaaaacgtagcccagaactcgccgggtggataaaagagcacgtcagttttccgggaaccatggtcgaccgcattgttccggctgcaaccgacgaaagtctggtggaaatcagccagcatctgggggtgaatgatccctgcgcgattagctgcgaaccgtttatccagtgggtggtggaagataacttcgtcgctgggcgtcctgcctgggaagtcgcaggtgtacaaatggtgaatgatgtcctgccatgggaagagatgaaactgcggatgcttaatggcagccactcttttctcgcttatctgggttacctcagtggattcgcccatatcagtgattgcatgcaggatcgcgcatttcgccatgccgccagaacattaatgctggatgagcaagcgccgacactgcaaattaaagatgtcgatttaacacaatatgcggataagttaattgcacgttttgctaatccggcgctgaaacataagacctggcaaatcgcgatggatggcagccagaaattaccgcaacgcatgctggcaggtattcgcatacatcaggggcgcgaaacggactggagcttgctggcattaggcgttgcaggctggatgcgttacgtcagcggcgttgatgatgccggaaatgccattgatgttcgcgatccgcttagcgataaaattcgcgaacttgttgcgggcagcagcagtgaacaacgcgtaaccgccctgctttccctgcgtgaagttttcggtgatgatctgccagataacccgcattttgtgcaggccatcgaacaagcctggcaacaaatcgtacaattcggcgcacatcaggcgctattaaacaccctcaaaatttaacgatttctgcggttaaagcggatgaagctcaccttcgtccgctctccccttctcttttctgccttttttagccaggattaacgctcagttaacttaccagagtattgcggagccgttgtgaccaggaccaacctcatcaccggttttctcggcagcgggaaaaccacgagcattcttcatctgttagcccataaagatcccaacgaaaaatgggcggtactggttaatgaatttggggaagtcggaattgatggtgctttgctcgccgatagcggcgcattgctgaaagagatccccggcggctgcatgtgctgcgttaatggtttacccatgcaggtagggttgaataccttactgcgtcagggaaaaccagaccgcttgttgatagagccgaccgggctgggccatccgaaacagatcctcgatctgttaaccgcaccagtctatgaaccgtggatagatctgcgcgccaccttgtgcattctcgatccgcgcttgctgctggacgaaaaaagcgccagcaatgaaaacttccgtgaccagctggctgccgcagacatcattgtcgccaataaatccgaccgtacgacgcccgaaagtgagcaagcgctacagcgttggtggcagcaaaatggtggcgatcgacaattaattcacagtgagcatgggaaagttgacggtcatcttctggatttgccgcgtcgcaatttagccgagttgcccgccagcgccgcgcattctcatcagcatgtcgtgaaaaaagggttagcagcgttaagcctgccagagcatcaacgctggcgtcgcagtctgaacagcgggcaaggatatcaggcctgcggctggatattcgacgctgatacggtattcgacaccattggcattctggaatgggcgcgacttgcaccggtggaacgcgtcaaaggcgtgctgcgtattcccgaagggctggtgcgaatcaaccgtcagggcgatgacctgcacattgaaacgcaaaacgttgcgccaccggacagccgtattgagctgatttccagcagcgaagctgactggaatgccttgcagagcgcgctgttgaagcttcgtttagcgactaccgcgtaaggttgcctgcgtttttcagtaagataattagagaaaatatgattaaaaatttgccgcaaatagtgttgttgaatattgtcggcctcgcgctgtttctttcctggtatatccccgttaatcatggattctggttgccgattgatgcggatattttttatttctttaatcagaaactggtcgaaagtaaggcctttttgtggctggttgcattgaccaacaatcgcgccttcgacggttgtagtctgctggcgatgggtatgttgatgctgagtttctggctgaaagaaaacgcccctggcagacgacgtatcgtgattattggtctggtcatgctattaactgcagtggtattaaaccagctgggtcaggcattaattcctgtaaaacgggccagcccaacattgacttttaccgatattaaccgcgtcagcgaactgctctctgttcccacgaaagatgccagtcgagatagctttcccggcgatcacggcatgatgctgcttatttttagcgcattcatgtggcgttatttcggcaaagttgcaggccttatcgcccttattatttttgtggtttttgcatttcccagagtaatgattggcgcacactggtttactgacatcattgtcggtagcatgaccgtgatattgatcggtttgccctgggtgttgctgacgccattaagtgatcgattaatcaccttttttgacaaaagtctaccaggaaaaaacaaacatttccaaaacaaataactcacagtaattaacatcatcagggttatttttatagtgaggataatcctgatgatgcgcaccgtgctttcatctatcgaacgcaaaaatcattctctaagtaaatgaatggattgcatgcgtttcactcaattgtactttaattgaccaaccccgcttattaactttctgtatcactttttcttataaaaaatcatgtaaaaccgctcgccaagaccgcaccaatcgggtaatctcgaactcgttttgcctcggcggtagattatcctcacagcatataattttgtgcgttagtccacagatttggccttaaggaattgtttcaacatgcccaggtaattagtctcgtgtcgcttggcatttttttataacgatatttgtcgttaaggacttcaagggaaaacaaacaacatggtcaaatctcaaccgattttgagatatatcttgcgcgggattcccgcgattgcagtagcggttctgctttctgcatgtagtgcaaataacaccgcaaagaatatgcatcctgagacacgtgcagtgggtagtgaaacaagtagtctgcaagcttctcaggatgaatttgaaaacctggttcgtaatgtcgacgtaaaaagccgaattatggatcagtatgctgactggaaaggcgtacgttatcgtctgggcggcagcactaaaaaaggtatcgattgttctggtttcgtacagcgtacattccgtgagcaatttggcttagaacttccgcgtagcacttacgaacagcaggaaatgggtaaatctgtttcccgcagtaatttgcgtacgggtgatttagttctgttccgtgccggtagtacgggacgccatgtcggtatttatatcggcaacaatcagtttgtccatgcttccaccagcagtggtgttattatttccagcatgaatgaaccgtactggaagaagcgttacaacgaagcacgccgggttctcagccgcagctaataaaccgtttggatgcaatcccttggctatcctgacgagttaactgaaagcactgcttaggcagtgcttttttgttttcattcatcagagaaaatgatgtttccgcgtcttgatccaggctatagtccggtcattgttatcttttaaatgttgtcgtaatttcaggaaattaacggaatcatgttcatacgcgctcccaattttggacgtaagctcctgcttacctgcattgttgcaggcgtaatgattgcgatactggtgagttgccttcagtttttagtggcctggcataagcacgaagtcaaatacgacacactgattaccgacgtacaaaagtatctcgatacctattttgccgacctgaaatccactactgaccggctccagccgctgaccttagatacctgccagcaagctaaccccgaactgaccgcccgcgcagcgtttagcatgaatgtccgaacgtttgtgctggtgaaagataaaaaaacattctgtagttctgcgaccggtgagatggacattccactcaatgaattgattccggcgctcgacattaataaaaacgtcgatatggcgatcttacccggcacgccgatggtgccgaacaaacccgcaatcgtcatctggtatcgcaaccctttgctgaaaaatagcggcgtctttgccgctctgaatctcaacctgacgcctagtctcttttatagtagtcggcaggaagattacgatggcgtcgccctcattattggcaatactgcgctatctaccttttctagtcgtttgatgaacgttaacgaattaaccgacatgccagtccgtgaaactaaaattgcgggcattcctctgaccgttcggctttatgcagatgactggacatggaacgatgtgtggtacgcatttttactgggcggcatgagtggaactgtcgttggcctgctctgctattacctgatgagcgtacgtatgcgccccggcagagaaatcatgaccgccatcaagcgcgaacaattttacgtggcgtatcaaccggtggtggatacacaagctttgcgagtaacgggcctggaagtactgctacgctggcggcatcctgtcgcgggagaaattcccccggatgccttcattaactttgccgaaagccaaaagatgattgtgccgctgactcagcacctgtttgagttaattgcccgcgatgccgcagaattagaaaaagtgctgccggtaggcgtcaaatttggtattaacattgcgccggaccatctgcacagcgaaagctttaaagcagatatccagaaactgctcacttccctgcccgcacaccatttccagattgtgctggaaattaccgagcgcgatatgttgaaagagcaagaagccacacaactcttcgcctggctgcacagcgtcggcgtagaaattgctattgatgacttcggcaccgggcacagcgcgcttatctatcttgagcgttttacgctcgattatctgaaaattgaccgtggatttatcaacgccatcggtacggaaacgatcacttcccccgtacttgacgcggtgctgacgctggcgaaacgcctcaatatgctgacggttgctgaaggggtcgaaacgccggaacaggcgcgatggctaagcgaacgcggcgttaatttcatgcaaggctactggattagccgcccgttaccgctggacgattttgttcgctggctaaagaaaccgtatacgccgcagtggtaaggtgtgcttacgtcccttattattcatagtgaaagcatgccggattgcggctaatgatgagtaaaaggaaatccgttgcagatgattgtgcgcatactgctgctgtttatcgctctgttcacctttggtgtgcaggcgcaggctatcaaggaaagctatgcctttgccgtgctgggcgaaccccggtacgcgtttaatttcaaccattttgattatgtgaaccccgccgcgccaaaaggtgggcagataacgttgagtgccctcggcaccttcgataatttcaaccgctatgcactgcgcggcaacccgggcgcacgcaccgagcagctgtacgacacgctatttacgacttccgatgacgaaccaggcagttattacccgctgattgctgaaagcgcacgctatgctgacgattattcctgggtggaggtcgctattaatccgcgcgcccgttttcatgatggtagccccattactgcccgcgatgtagagtttacttttcaaaaatttatgaccgaaggcgtgccgcaatttcgtctggtctacaaaggcaccaccgtcaaagccattgcaccgttaaccgtgcgcattgagttagctaaacccggcaaagaagatatgctgagtctgtttagcctgccggtatttccagaaaagtactggaaggatcacaaacttagcgacccgctcgccacgcctccgcttgccagtggtccgtaccgcgttacgtcctggaaaatggggcaaaatattgtctattcccgtgtgaaagattactgggcagcaaacttaccggtaaaccgtggacgctggaatttcgacaccattcgctacgattattacctcgatgataatgtcgcctttgaagcgtttaaagcaggtgcctttgatttgcgtatggaaaacgacgccaaaaactgggccacgcgttataccggtaaaaatttcgataaaaaatacatcatcaaagatgagcaaaagaacgaaagtgcccaggatacgcgttggctggcgtttaatatccaacgtccggtattcagcgatcgccgggtccgggaagctatcactctcgcctttgactttgaatggatgaacaaggcgttgttttacaatgcctggagtcgcacgaacagttattttcagaataccgaatacgcggccagaaattaccccgacgccgcggagctggtgcttctggcaccaatgaaaaaagatctaccgagtgaagtcttcacacaaatctaccagccgccggtatccaaaggcgatggctacgatcgtgacaacctgttaaaagccgacaaacttctcaacgaagcgggctgggtgctgaagggtcagcaacgcgttaatgccacaacgggtcagccactcagctttgaattattgcttcccgcaagcagcaatagtcagtgggtattgccgttccagcacagcctgcaacggctgggtatcaacatggacattcgcaaggtggataacagccaaatcactaaccgcatgcgcagtcgcgactatgacatgatgccgcgcgtatggcgggcgatgccgtggcccagttccgatttacagatttcctggagtagcgaatatatcaattccacttataatgcccccggcgtgcaaagcccggttatcgacagcctgatcaaccaaattattgccgcgcagggaaataaagaaaaattactgccgttggggcgagcactggatcgcgtattaacgtggaattattacatgctgccaatgtggtacatggcggaagaccgtctcgcctggtgggataaattctcccagccggccgtgcgccccatctatagcctcggtatcgatacctggtggtatgacgtcaataaagcggccaaactgccgtccgccagcaaacagggagagtaaatgggcgcttacctgattcgccgtctgttgctggtgatcccaacattatgggcgattatcaccatcaactttttcatcgtgcaaattgcgcctggcggtccggtcgaccaggccatcgccgccattgagtttggtaatgccggagtattacccggcgcaggcggtgaaggtgttcgtgccagccatgcgcaaacgggtgtcggcaatatcagcgacagtaattaccgtggcggacgcggattagatccagaagtgatcgctgagatcactcatcgctacggttttgataagccgatccacgaacgttacttcaaaatgctctgggactacatccgctttgattttggcgatagcctgtttcgcagcgccagcgtgctgacgctgattaaagacagtctgccggtttccatcaccctcggattgtggagcacgctgattatctatctggtgagcattccgttaggcattcgcaaagctgtttataatgggagccgctttgacgtctggagtagcgcatttatcatcatcggctacgccattccggcctttttgtttgccatcctgctgattgtcttcttcgcgggcggcagctatttcgacctgttccctctacgcggcctggtttccgctaactttgatagcctgccgtggtatcagaaaatcaccgattatctgtggcatatcacgctgccggtgctggcgacagtgattggtggctttgcggcgctgaccatgctgacaaaaaacagtttccttgatgaagtgcgcaagcaatacgtggtgaccgcgcgtgcgaaaggggtaagtgaaaaaaatattctctggaaacatgtgttccgcaacgccatgctgctggtgattgccggttttccggcgacgtttatcagcatgttttttaccggcagcctgctgattgaggtgatgtttagtctcaatggtctgggcttactgggctacgaagcgaccgtcagccgcgattatcctgtaatgtttggtaccttgtatattttcaccctgattggcctgctgctgaatattgtcagtgatatcagctatacgctggttgatccgcgtattgattttgagggacgttaatgagccgactcagccccgtcaatcaggcccgttgggcgcgttttcgtcataaccgtcgcggctactggagcttatggattttcctcgtcttgtttggtttgagtttgtgttctgaacttatcgccaacgataaaccgttgctggtgcgttatgacggcagttggtatttcccgttattgaaaaactacagcgaaagcgattttggcggcccgctggcaagtcaggctgattatcaggacccgtggctgaaacaacggctggaaaataacggctgggtactgtgggcaccgattcgctttggtgctaccagtatcaactttgctaccaataagcccttcccttctccaccctcccggcaaaactggctgggaacggatgccaacggcggcgatgtgctggcacgcattctctatggcacgcggatcagcgttctgtttggcctgatgctgactctctgttccagcgtgatgggcgtgctggcgggggcgctacaaggctattacggcggtaaagtcgatctctggggacaacgctttattgaagtatggagcgggatgccgacgctgtttttgattattttactttccagcgtcgtacagcctaacttctggtggctgctggcaattactgtcttgtttggctggatgagtctggtcggcgtggtgcgggcggagtttttacgtactcgtaatttcgactacattcgtgcggcacaggcgcttggcgtcagcgatcgcagtatcatcctgcgtcatatgttgcctaatgccatggtcgcgaccctcacctttttaccgtttattttatgtagtagcataaccaccctgaccagcctcgatttcctcggcttcggtctaccgctcggtagtccgagtctcggtgaactgctgttacaagggaaaaataaccttcaggccccgtggcttgggatcaccgccttcttgagcgtggcgatattattgtctttgctgatctttattggtgaagccgtccgcgacgcatttgatcctaataaggcggtgtaacatgacgcaaactctgttagcgattgaaaatttgagcgtgggttttcgccatcagcaaaccgtacgtacagtagtcaatgatgttagtctacagattgaggctggcgaaacgctggcgctggtgggtgagagtggtagtggcaaaagcgttaccgcgctgagtattttacgcctgctcccttccccgccggttgaatatctctccggcgatattcgttttcatggcgaaagcctgcttcacgccagcgatcaaacgttgcgcggtgtacgcggtaataagatcgccatgatttttcaggaaccgatggtgagcttaaatccattgcataccctggaaaaacagctttatgaagtgcttagtctccaccgcgggatgcgtcgggaagcggctcgtggcgaaattcttaactgccttgatcgcgttggtatccgccaggcggcaaaacggctgacagattatccgcatcagctctccggcggcgaacggcagcgggtgatgattgcgatggcgctgttaacgcgaccggaattattaattgccgatgaaccgaccaccgcactggacgtctctgtccaggcgcagattttacagctgttgcgcgaactgcaaggcgagctgaatatgggcatgctgtttattactcataacctcagcattgtcagaaaactggcccaccgcgtggcggtaatgcaaaacggtcgctgtgtcgagcaaaattacgccgctacgctatttgcaagtcccactcatccttacacacaaaagctactcaacagtgaaccgagtggcgatccagtgccgttgccagaacctgccagtacgttgctggatgttgaacagcttcaggttgccttccccattcgcaaagggattttgaagcgcattgtggatcataatgtggtggtgaaaaacatcagttttacgctacgagcgggtgaaacactgggtttagtgggcgagtccggttccgggaaaagtacgacgggactggcgctgctgcgactgattaattctcagggcagcatcatctttgacggtcagccactgcaaaatttaaatcgccgccagctgttacctattcgtcatcgcattcaggtggtatttcaggatccaaactccagcctcaacccacgactcaacgttttgcagattattgaggaaggcttacgggttcaccagccgacgctttctgccgcacaacgcgaacaacaagtgatagccgtgatgcatgaagtgggattagatcctgaaacacgccaccgttatccggcggagttctctggtggtcagcgacaacgtattgcgattgccagggcattaattcttaagcccagcctgatcatacttgatgaaccgacaagtagtctcgacaaaacggtacaggcgcaaatattgacgctattgaaaagtttgcaacaaaagcatcaactggcctatttgtttatcagccacgatttgcacgttgtccgcgcgttatgtcatcaggttatcatactgcgacaaggggaagtagtggaacaaggaccgtgcgcgcgcgtgtttgccacaccgcagcaggagtatacgcgtcagctactggcgttgagctgacgcttaaaaaggattgtagttactaaagggttcggcaattgccacaccaaaatttttcaatcggcatgttgcagcaaactcgtcctggcgatttacaaacaggcacggctcaccttcacactccagcacgctacatggaacttcgatgtcgcttaacgcctggcttagtttatacatcacgctccatgcattatcaccatccgggctaagcaatttaagcgccaccaggctgttgtcaccgcacggtccattttgcggaatcggttcaaccttgctacctgcgaaaccagcagaccagcgatagttctgcggcagtcgatggacgatactgagttgtaaactagtcacttattttccccggaagcacattcacttcacaatttgtttacatcaattttaacacatcatcaacaatccgtctttatacagatcgtaaagattgatgcctcgcctgcgtggcctctatggctctgatttaagtaatatctgcgggcgtggtcacgtttgcggggctatatgtacccgtttctgcgatctaactcaacctttttaactacaatgatgtgactttttacataaattgattttacataaaataaacatatatcgggggaatgatagatttgtggttgacatgcatcaacaaaggaagccttttagcttcctcgttgtgcaatagatcaccgttttttcggccgactggcgtacagacagaagagaatggagctggttgcgcagaatgcaatactccaaatcatcggccatgcagagttaaaggtcgcaagagaaagcaatgcgccaacaattgcccctatgccaaaacggaaggttcctgccaggctagatgccgttcccgccatatggggaaactcatcaagaatgaccgccatcgcattggaactcaccatgctcacgcagcccacaaacgccgcaacgccaaccaccaggctccaaaatcccagccccagcagcgcactgatgaccatccacgctgccataataaattgtatccacaacccgctgcggaacatatttaacgcgccaatgcggcggacgaagcggctgttaaagatggtcatcacgaacagaaaaacaatgtttagcgcaaagtaataaccaaagttttccggcgcgacgtggttaatttcaatataaacaaacggtccggcgcttaagaaactgaacatcccggcaaagctgaaaccactggcaagcatgtagctcaggacacgtttatggcggaacagcgccgcaaagttaccaatagtggtacgaatgtgaaatggctgacgacgctccggtggtaaggtttctttaatcaggaagaaaatcattgcgctagccagaatcgccgctaatgccaggatccagaagatgtaatgccagctcagccacaccagcacccagccgccaactatcggtgccatcagcggtgcaatggttgtcaccagcatgacaaagctcatcatccggctgaactcttctttcgggtaaatatcgcgcatcagggcgttaatgaccacgctggccgcagccgcagccagcccgtggaagaaacgcatcacaatcagctgatcgatggtgtttgccaacgcacacgccaccgcggcggcggcaaacaccagcgtaccgccgagcaccaccggcttacgcccgaagctgtctgccatcggcccgtagattaactgccccaacgcaaagcccagaatataagtactgagggtcatctgcgtactgcccgccggtacgccaaactgcgcactaattaccggtagcgcgggcagatacatatcaatgctcagcggcatcaacatggccagcaggccaaggataaaaacaatagcaaagctgctatgctgtcgggtggtcacaacgggctcctgaaagtcattgaaaagttagacgacgctggcaatttcttcttcagttaacggacgatattcaccgggggctaaatcagcatccagcgtaataccgccaatacgttcacgatgcagctcaaccacgtggttacccacggcggcgaacatgcgtttcacctgatgataacgcccttcgctgatggtcagacgaacctgcgttggggtaatcacttccagcaccgcaggcttagtgagatctttttcgttatgcagctgcacgcctttagcaaattgctctgccgtatcgtcagctacaggactttccagtgtcaccagataggtcttctcgcaatgatggcgcggagaagtaatgcggtggctccactgaccatcatcagtcatcagcaccagaccggtggtatcaatatccaaccgccccgccgcatgcagtttccacgctaccggttcatcaagaaaatagagcaccgttgggtgatcagggtcgtccgtggagcaaacatagccctgaggcttattgagcatgaagtaacgtggaccgtgttgctgcgccagcgggttgccatcgtaagcgacatcatgttcaggaagcagtttgaacgctgcattacggacgatttcgccatcgacggtgacacgattgccgcggatttcacgcccggcaatagcacggctaacgccgagttgctgtgcgataaatttatcaagtcgcatgtgtgtgattttgcctgtaaaaacggaggtcgggcattgacccgaaaatctgaactgttgtctgcccagtatagcggtctaataacatccctcaagggaaaaagatccatggcatactattagcagaataatctacctacgcgagaccatgatttttacacttcgcccatatcagcaagaagccgtggatgccacgctcaaccattttcgtcgtcataaaacccctgccgttatcgtgctgcccaccggcgcaggtaaaagcctggtgatagcggaactggcacggctggctcgtggtcgcgtgctggtgctggcacacgttaaagaactggtggcgcaaaaccatgcaaagtatcaggcgctggggctggaagccgatatttttgccgccgggctaaagcgcaaagagagccacggtaaagtggtatttggcagcgtgcagtctgtcgcccgtaatcttgatgcctttcagggtgaatttagcctgttgattgtcgatgaatgtcaccgtattggtgacgatgaagagagccagtatcagcaaatcctcactcacctgacaaaagtgaatccccacttacgcctgctggggctgactgccacgccttttcgattgggcaaaggctggatctaccagtttcattatcacggcatggtacgcggcgatgagaaagcccttttccgtgactgcatttatgagctgccgctgcgttatatgattaaacacggctatctgacgccgccagaacgactggatatgccagtagtgcaatacgatttcagccgcttgcaggcacagagtaacgggctgttcagcgaagccgatctcaaccgtgagctgaaaaaacaacaacgtattaccccgcacatcatcagccagattatggagtttgctgcaacgcgcaaaggggtgatgatttttgccgcgacggttgaacacgcaaaagagattgtgggattactgcctgccgaagatgcagcactgattactggcgacacccccggcgctgagcgcgatgtgttaattgaaaattttaaagcccagcgttttcgctatctggtcaacgtcgcggtactgaccaccggatttgacgccccgcacgtcgatcttatcgccattctgcgccctaccgaaagtgtgagtctttaccaacaaattgtcgggcgcggtctgcgtctcgctccgggcaagactgattgcttaattcttgattatgcgggtaatcctcacgatctctacgcgccggaagttggtacaccaaaaggcaaaagtgacaacgttccggtacaggttttctgccctgcctgcggttttgccaacaccttttgggggaaaacgaccgccgacgggacattgattgaacactttggtcgtcgctgtcagggatggtttgaagatgacgacggtcatcgcgaacaatgtgacttccgtttccgttttaaaaattgcccgcaatgtaacgcggaaaacgatattgccgcccgccgctgccgcgaatgtgacaccgtactggttgatccggacgatatgttaaaagcggcgctacgactgaaagacgcgctggtattacgctgtagcggcatgtctttgcaacatgggcacgacgagaaaggcgaatggttgaaaatcacctattacgatgaagacggcgcggatgtgagtgagcgtttccgtctgcaaacacctgcccagcgtaccgccttcgagcagctttttatccgcccgcatacgcgcacaccgggcatcccgctgcgctggatcaccgccgccgatatcctcgcccagcaagccttattgcgacacccggattttgtcgtcgcccgcatgaaaggccagtactggcaggtgcgtgaaaaagtgttcgattacgaaggtcgttttcgtctggcgcacgaattacgcggttaatggtagttttgattgatgtataaggcgattgagtatagaatctcgcccgcttttgcatacgcaaagcagatcacttacctgttgctgggtcgcctgtagcaggattaatttaagagagaaagaaatgtttactatcaacgcagaagtacgtaaagagcagggtaagggtgcgagccgccgcctgcgtgccgctaacaagttcccggcaatcatctacggtggcaaagaagcgccgctggctatcgagctggatcacgacaaagtcatgaacatgcaagctaaagctgaattctacagcgaagttctgaccatcgttgttgacggtaaagaaatcaaagttaaagctcaggacgtacagcgtcacccgtacaaaccgaagctgcagcacatcgacttcgttcgcgcttaattgctgaataagttgtaaaaaaccccgctccggcggggttttttgtatctgcagattatgcctgattacggtattgctattttttgcaggccagataaggcgttcacgccgcatctggcattcagaacacaaaaccgattaattgccgccagacgtccggcgctgcaattggtcgcgcaaattcggcggcgtgcctttaatggtcaaggtatcggttgctggatcccagaagatgcgttcacctaacagcatcgcatcaaagttaatagtcaagccaccgccgctaccggcaaacttcgtcaactgacgcagtgtgctacggtctgccgggaagctctcttccagttcgtagcctttttcagccgcaaactccgtgaagctcacttcgcttacgcctgccagctctttgctcaggcttttcagttcgatctcttcgcctgcctgcagctgctcattacagtagctataaacctgctggcgcacgttctgtcgctctgctttatccagttgtgcttcggcagtgaaatcatcaaccgcttgcaacagcccacggttttgcgctttcgcgtttaacccttcgctggccccgaggaaatccataaagaaatccgccactttgcgccctactcgccctttcaggaaagtgagatagcgggtggactctggattggtttcccattcggttaaatcgatacgcgcaacaatatccgcatgattgatatcaagataatgggttgggttgatgtcgagattttcgttaacgcgcatactgctcaggttgctcagaactgccaccagcaaatactccaccgccagatagcgatagtggcaaaacagcacgaatccaccgtcagcaaaaggatatttcgctaattcgtcacgcaggcggccggttgccgcgcggctaaatgccaggaagtcctcttcgccctgacgctgtaagcgcagcgtctgcgccagttcactctcttcgctaaacaagccgtaagctttatttttggcgctatagacccgatgcagttctgccaccatctcaacgacggtttctgtcggttccagcaaactatcgcgcaacaccagctcaaggttctgctcatcacgcttgataagctggtgcagagcaatctggttgatatccagactcatgataaactctcctttaagaccgggcggtattcaaccaccgccggttaagcgacgcaataaaagatggcggtcattttacagaaggcagcgtaacgagaatgatttaacgcataaaaaagcagaaaaaaaaccgttgctacggtaatatgttgccctttcatcaactaactgatttcgatttatgccacaaatttcccgctacagtgatgaacaggttgaacaattgctcgcagagctgctcaacgtactggaaaaacataaggctccgaccgacctttccctgatggtgttaggcaacatggtcactaaccttatcaacaccagcattgccccggcccaacgccaggcaattgccaactcttttgcccgcgccttacagtcctctatcaacgaagacaaagcgcactaagggaaacagataacaggttatggtaactcatcgtcagcgctaccgtgaaaaagtctcccagatggtcagttgggggcactggtttgcactgttcaatattctgcttagcctcgtcattggcagccgttacctgtttatcgccgactggccgacaacgcttgctggtcgcatttattcctacgtaagcattatcggccatttcagcttcctggtgttcgccacctacttgctgatcctcttcccgctgacctttatcgtcggctcccagaggctgatgaggtttttgtccgtcattctggcaacggcgggaatgacgctattactgatcgatagcgaagtctttactcgtttccatctccatcttaatcccatcgtctggcaactggttatcaacccagacgaaaatgagatggcgcgcgactggcagctgatgttcatcagcgtgccggttattttattgcttgaactggtgtttgcgacgtggagctggcaaaagctgcgcagcctgacgcgtcgtcgacgcttcgcgcgcccgctggccgcattcttatttatcgcctttatcgccagccatgtggtgtatatctgggccgatgccaacttctatcgcccgatcaccatgcagcgcgctaacctgccgcttagctacccgatgacggcgcgacgttttcttgagaagcatggtctgcttgatgcgcaggagtatcaacgccgtcttattgagcaaggtaatccagacgccgtttccgttcagtatccgttaagcgaactgcgctatcgcgatatgggcaccgggcagaatgtgctgttgattactgtcgatggcctgaactacagtcgcttcgagaagcagatgcctgcgctggcaggttttgctgagcaaaatattagcttcacgcgccatatgagctccggcaacactacagacaacggcatctttggcctgttctatggcatcagcccgagctatatggacggcattctgagcacccgtacgcctgcggcattaattactgcgcttaatcagcaaggctatcagctggggttattcagtagtgatggctttaccagcccgctgtatcgccaggcattgttgagtgatttcagcatgccgagcgtacgcacccaatccgacgagcagaccgccacgcagtggatcaactggctgggacgctacgcacaagaagataaccgctggttcagctgggtttctttcaatggtactaacattgacgacagcaatcagcaggcatttgcacggaaatatagccgggcggcaggcaatgtcgatgaccagatcaaccgcgtgctcaatgcactgcgtgattctggcaaactggacaatacggtggtgattatcactgccggtcggggtattccactgagcgaagaggaagaaacctttgactggtcccacggtcatctgcaggtgccattagtgattcactggccaggcacgccggcgcagcgtattaatgctctgactgatcataccgatctgatgacgacgctgatgcaacgcctgctacatgtcagcacacctgccagcgaatatagccaaggtcaggatttgttcaaccctcaacgccgtcattactgggttaccgcagcggataacgatacgctggcaattaccaccccgaaaaagacgctggtactgaacaataacggtaaataccgcacttacaacttacgtggtgaaagagtgaaagatgaaaaaccacagttaagtttgttattgcaagtgctgacagacgagaagcgttttatcgctaactgattaattataaatcagttagcgaaatatcttacttgcaatcggtgtggaaaacggtagtattagcagccacgagtcggcacgtagcgcagcctggtagcgcaccgtcatggggtgtcgggggtcggaggttcaaatcctctcgtgccgaccaaaaatcccaagaaaaaaccaacccttacggttggtttttttatatctgcaattaattcgataaacagaccgtgacacatcacagcctgtttattttctgttatcagaacgtcctgagctttcatcctatgaaattaattgctgttaaaagcattgggtacagaaaatacccatagctccatacccggagtcagtttttaaaaactgtttaaagaaatgcacaagtattgtgattgattttttagttgtttttcttgatgagaagctgatgcaaaattccgtctttataatgaaaatgatgccaaagcgaacgacaaggttgtagttttcactacatgtccatacataaaatggggtaacattcacgcgcctggtagcgttaccaacgctacgctcaaacataatgattctaataaaacctcaggagactactatgcctgaagcaacaccttttcaggtgatgattgtggatgatcatccacttatgcgacgcggtgttcgtcagttactggagcttgatcctggctctgaagtggtcgccgaagcgggcgacggcgcgagcgctatcgatctggcgaatagactggatatcgacgtgatcttgctggatctcaatatgaaaggtatgagtggcctggatactctcaatgccttgcgcagggatggcgttaccgcgcaaattattatcctgaccgtatccgatgcctccagcgatgtctttgcgctgatagacgcaggcgcagacggttatctgttgaaagacagcgacccggaagtattgctggaagcgattcgtgccggagcgaaaggcagcaaagtctttagcgaacgcgtcaatcagtacttacgtgaacgtgaaatgtttggcgcggaagaagatcccttcagcgtgctgacggagcgcgagctggatgttctgcacgagctggcacaggggctgagtaataaacagattgccagcgtgttgaatatttccgagcagacagtaaaagtacatattcgcaatctgctgcgtaaactcaatgtccgcagtcgcgtggcggccaccattctgttcctgcaacaacgcggggcacaataaaaatagcccgatggatttatcatcgggctgagatttatgacaaacgcaaaactgcctgatgcgctacgcttatcaggcctacgtggatcgatcaatttattgaatttacacaattttgtaggccggataaggcgttcacgccgcatccggcataaactaagcgcactttgtcaacagtctagcccgatggcatcaccatcgggcctctttttatttactctcctgcgggctcaaatgttgcatcgcctgcgcgatactacgttcaatcaccgcacggcgagtatcgttggcaggtaagagtttcaacatcatctcccacgcggcaacggcttcgccaaatcgctgctgctcaaaggcattaaacgcatacatgcttagcacacggatattgctatggtccgttctcaccagctgacgtagcagttcaccgccgaggcggttgtcgttgggatcagaactacgagtcaacgcttcagcgtatcccagtgcagcatcactgtttttcggatcgaggcgatacgcagtggcgtatgcatcggtggcgatactggcgttacccagcgccatgccaacgcggcccaacataatccagccttctatatctcccggatttttttgcagttgagtacgcatccccagcgcaagacggctcatctcttcttcgttgagcggatcggctttcggatccagcgccctgtccagcaacgccggagcctgtgccgtggcctgctgccagattttcacctgctgataattgccagtctggtagtagctgacgccagccacaattaacgccaccacaatacccggcagataaacaacatatccggcacgcttaccttccggcacgctttgttcaggaaacgcttccggcaccacgcgtacccgacgccggctgcgggcgtatatgacccaaccgccaatgccaatagccactactggcagcacccacagcagcacggtcagcggcgttaacggcggatcgtaagtgacgaagttgccgtaacgcgccaccatataatcgacaatctcttttttacttttaccttcctgcatcagttcatacactttctgacgcaggtcggtggcaatcatgctgttggaatcggcaatgctgttgttctggcatttcgggcagcgcagttcttcagtgagctgacggaactgttgttcctgtgcttcatctttaaactgcaacacatcgatggtcgccagcgcactgccggagatcatcagcatcagcacgcccaataaaaacctcattgtgcggcctccttactgtatttctcccacagcggcttgatctcttcttcccagacgcgaggattcagatcgcccgcatggcgatagcgaatgatgccgttgccgtcaataagaaacgtttctggcgcgccatagacaccgagatccagccctaacatgccatcgccatcaaacaggcttagcgcgtaaggattgcccagctctttcagccagctgattgccttctggcgatcgtctttatagttcatgccgaccacgcggatgccctgcgcagaaagctgattcagatattgatgttccgcacggcaggtcggacaccaggtcgcccagacgttaagcagtactggtttgccctgagtcagcacatccgcctgataaaactgccccggattgtccagactttcgagacgaaacttcggcacaggcttgccaatgagcgcgctttccagattggtcggatcatccccttcggcattacgcgccagctgccacagcagcgccgcggcaatcgccaggaagataatcaacggaattaacaatactttgcgcttcatacggcctccggcgcagttttttgcggactcacgcgcttacgatagcgaggatcaaacagacacagcagtccgcccaacgccatcatcagcccgcccgcccaaatccagcgaacaaatggtttgtagtaaagacgcacggcccacgcgccgttttccagctcttcaccgagggccgcgtacaggtcacgcgtgatgccgccgtcaattgccgcttcggtcatcatgctcccggcagtgttgtaataacgtttttccgcatacagcaccgtttccggcttgccatcgcgcgttacgccgatagtcgccacaccgccacgccagttcgggccagtcacctctttgacatcacggaaggtgaagcgatattcatgaatatcgacgctatcgccggacttcatgcgcacatcacgctcaacgctatagttctggctaaaggcaatgccaacaattgtcactgccagcccaaggtgagccgccaccatcccccaataactgaaggtggttttcgtgccgcgactaatacgtagcgcagcttccgcaattgccagcaccgcaatccagcaggccattgccaggccgagcaccgtcatcgccacaactttgctttcgaacagccacggcaacagcaggctcagcaccagcgtagagatgaaggcgataatcaataaattgcggatcttacgcgggcgatcccgcccccagcgcaccagaggaccgacaccaagcagtagcgcaaacggcaccatcagccaggtaaacatggtgttgaagaacggttcgccaatgctaatactgcccagtcccagttgcttatgcaccaacggcagcagcgtccccagcaacaccaccagcatcgcagcgaccagcaaaacattgttcgctaacagcaaagattcccggctccacagcgcattgtttacgcgactgcgaactttgtgtccacgcgcggcaaacagcagcaggctaccgccaatcaccagcaccataaaggcgaggataaacataccgcgcgccggatcagacgcaaacgcgtgtacgcttaccagcacgccggaacgcacgaggaaagtccccaacagacacaagctgaaggcactgattgccagcagtaatgtccacgctttgaagctggcgcgttgttcagtgaccgccagactgtgcatcagcgcagtccccaccagccacggcataaagctggcgttttctaccggatcccagaaccaccagccaccccagccgagttcgtaataggcccatgcggaaccgagcacgatgccgagcgtcaggaagatccacgctgccagcgtccacggacgagtaaaacgcgcataagtgctgtccagacgcccgctcagcaaagaagcaatggcaaaagcaaacgccacgctgaaacccacgtaccccatataaagcagaggcggatggaagatcagccccggatcctgcaatagcgggttaagatcgcgaccttcaatcgggaagttcggcaacgtgcgagagaacgggttagaggtaaagagaatgaacagcaaaaagccgacactgaccatccccattatcgccagtacacgggccacaatatccagcggaatacgctgactaaaaatcgccaccgcaaaggtccagccgctcatcagcagcacccacagcagtaggctgccttcatgcgcgccccaggtagccgccacgcgataccacaccggaagctgggtattggagttgctggcaacataggtgacggtgaagtcgttgaccacgaaagcattgaccagcaccagaaatgcgccagccacagacataaacagcagccaggcaaacaagcgggaagacgccatcatgcgcgcatctccgcgcgccacgccccatagcggatacacggacagcagcagcgcaattcccagcgccaggcacagcagtccgttaccaatttctggcatcatgatgctgggtccttataaacttacgtcaacttgctgggtccttataaacactcgccgggcgacggtggttagcttccatcgctttctcaacttctggcggcgtatagttttcatcgtgtttcgccagcacttctttcgcgaggatatgattgcctttttccagttcgccctgcaccacaacgccctgcccttcacggaacagatccggcaaaatgccttcgtaagagacatccacactgccttcagcatcgtaaatggtgaaggtcactttcaggctattgggatcgcgctgcacactacccggcatcaccatcccgccaacgcgcagacgctgaccgacttccggcatttgctgagtttcacgcttgccgtagagaatttcccccggcgtataaaagagatcgatattgctgcgcagcgcatatagcaccagaccgatagtcagcgccagccctgccaacacggcacaggcaatccacaagcggtttttacggcgaatattcatgcagcctcctgctgttgcgcagcacgtaaacgcgcctcacgcgcccgctgttgcgccacgccacgcagaattgcgcgatgttgcatcacgctgtgcacgaccaaaaccaccagcggaataacggtcatcaccaccgccagccagacaaaaaaggcgtaaccgcccattgcgaaaaattcattccaggaagcaaatgcaggggtcatttacggcctcttttcagtatcagttcactcacccacggacggcgtttttccatcagcaaaatcaaattacgcatccgcatcagcgtcagcgtggcagacaggagcaggaagccaaaaatgctccagcgcagcgggctacgcatcgccggatcgatactttgctgcatccgcgtacttccctgatgcagggtgttccaccactccacggagtaatgaataatcggcagattcaccacgccaatcagcaccaggatacctgccgcacggcccgccagacggcggtcgtcgaaggcgtgccacagggcaatcacacccacatacaaaaacagcagcaccagttcagaagtcagacgtgcatcccatacccaccaggtgccccacatcggttttccccatgcagagccggtaaccagggcaataaaggtaaacacggcaccaatgggggccatcgccgccaccgccaggttggccattttcatctgccagacaaggccaataaacgctgccactgccatacttgcataaatgcccatgctccagatcgccgcaggcacatgcaggtagataatgcggtagctatttccctgctgataatcagccggagcaaagccgaatccccagatccagccgacggtaagcacgaccacactggcaattgccagccacggtataaaccagccacagatttgatacagccgtggtgggatcgccagttgatgcagtgttttccacatagtttcgataccagactcgaacaaaaatcagtaatccagcgttattgaatgctgattcgtaacgctgccgccgtcgcaaaaggacttaatgtcgcggtgcctgccagcaacgcgcctaaaattgccagatacccgtcaacgggcaaatgcatagaagccgcgtccatcgcggcggtggcaaagatgagtaatgggatagtcagcggtaacaccagtatgctgagcagcacaccaccgcgcttaagtcccactgtcagcgccacgcccggtgcaccgagaaagccaagcgtaggcgttcccagcagcagcgtcagcgccatcacttgccagccataaacatccattcccagtagcattgctaccagtgggctaaggatgagtaacggcagaccggttaccatccagtgcgccatcaccttcgccagcacaacggcgggcaagggtaacggcaacaacatcaattgttcaagactgccgtcctgcaaatcgtcacggaacagtcgttccagcgccagcaaggaactaagcagcgcagcaacccagataatgcccggtgcaatacgcgccagcagttgcggctccggaccgatactgagcggaaaaagggtaattacaatcaggaagaaccacagcgggttggcgatttcggcgctatggcgaaacgctacacgcagctcaagacggaaaatgcgccagaacatcatgcggccctcgtttgcgtcagactaatgcggcgaattttactttcagcaacgttgagcggctggtgggtagtcagaatcacaatccccccctgctccgtatgctgcgccatacgctgggtcagacgatcgacaccgttaacgtcaatcgcggtaaaaggctcgtcgaggatccataacgtggcacgggtcagccacagacgcgctaaagcgacgcggcgttgttgcccggcgctgagctgatttacaggaatatcttcgaatccggcaagcccggcctgcgccagggcttccagacattgtgcggtatcgccatcgcgatgataaaagtgcagattttctaacgccgtcagccgggttttgatccccggctgatggcctatccataacaggttttgatggtagctgtcgcgtacctgatgcaagggctgcccttgccagagaacctcgcctgcgtcagggcgagacaaccccgtcagcaaacggagaagcgttgtcttccccgcgccgttgctaccggtgatttgtacccactctcctgcgttcagcgtaaaactcaagccactaaataaggttcgttcatcccgctcacaaagtaactctctggcttcaagcatacccacgcaataaccctgttaaaaacctggctcgacttcacgcatatcgggcagcttgtgcgctatccctttatggcaatcaatacaggtttgcccatctttcaccgcctggtcatgcatcttcgcggcaacgcttttctgggcggttgtatccatatactcgaagttgtgacagttacggcactcctggctgttattgtccttcatgcgccgccactcattctgtgccatcgtcagacgatgagcttcaaatttctgcggcgtgtcaataacgccaaaaattttaccatacagctctttacttgctttgagcttgcgtatcatcttcggcacaaactcgtgcggaacgtgacaatccggacaggtcgcacggacgccgctacggttgttgtagtgcacggaatccatgtattcctgatacaccgtgttgcgcatttcgtggcagctaatgcagaactcttcggtattggctttttccatcccggtgttaaagccaccccagaagacgatgccgccaacaaaaccgatcaacagcagcgtccccagcgccagacggctgggggtacgccaccatttccacaggcgcttaatcagaccaggcttacggtcagaatttcccataataacctcttatttcccgtaacctttacttggggtaaaggtattccccacgattggcgcggtatcggcctgcggtacgtgacattgcagacagaaataacgacgcggagccacttccgcgcccactttgccgtcgctgtccataaagtgagtaggactgatacgcggcgcgccagtggtgcgatagctttcgacaccgtggcactgcaagcagcgattggtattggtcgttacctgataaccttcaacgctatgcgggatcattggcggctgattcacatagttcagcggcatccgatcctgctcttttggcatccgaatggccccttcctgtgtcccggatacttccgggctctggctaaaatcgacgccattagccgcccaaaccgcgccgcttaccaccagggccagcatcgccgtccattgacacagcgctttcttcaggtcatggcttttcatgatttcgctcccgaactccattatgtcaacttttcgctccgctactccatcgtgtagttattgtaaatacatcctcagaacagacatccacgcagcgaccgcacgtcatgcaatcgcggctggtgacctgcaccgggctttgttcatccagcaccggggcacgtagcacatgcggttccgggcaaacatgaaaacaatccatacagcggttacatttctgccgatcggtggccgcaacggtaatcacacctttgctacccagcacgccatacagcgcgccaaccggacaaatgtgcccgcaccagccgtgttcaacgaccagtagatcaaataaaaacagcgcgagaataagcagcgcgccgctgccgaagcccattaccaggctacgccccatcagagaaacggggttgatccattcccaaatgagcgtgccagttaaggcacttcccaccagaatgaccaccaacagcacgtagcgaatgtggcgagggatcgtcgcagactgattgaggtcaaagcgcctgcgtaaccagttcgctaagtcggtaatcgggttcagcgggcagacccagctgcaaaataatcgctttcccgccagggcgtagagcacggtgataatcaccgcaccggtcaacgccaccgtggcaggcagatgaccactggcaagactttgcagcgtcatcagcggatcggtcagcggaacggtgtcgaataacaggctactgctgtagttgccgtgcaagatccacacaccaaaccatggaccgctcaaaaacatccccagcacgaagaactgacaaaggcgacgtaacaccagccaacggtgactgcgccaccagccttttttctccagcgcctcgcgcccggcgtcacgtttacgatttgccattgttcccctccagccagccgttacttagcttttgccattgttcccctccagccagccgaagcggtaatggtgacctaactcccctttcgccagactcagcggtaacaccttgattgccggttgttccagcacgcatactttttcgcacttaccgcaaccggtacaggcgtcgctgtgaaccgtcggcagaaagcgggcgtgcttaccggtacgcgtgttgcgctccagctccagggtgatggcctcatcaattttcgggcattcgcgataacaaacatcgcagcgcagcccctgaaagttgagacagttttcctggtccaccagtaccgccagccccatccgcgcgtcgtcgatgctttcaatctcacgatccagcgcaccgcttgggcacactttggcgcacggaatgtcctcacacatttcgcaaggaatatcccgtgcgacaaaatatggcgtgcccgcgctcagaccagaggccagcgtcgccagttttaaggtgtcgtaagggcaagcctgaacacactgaccgcaacgcacacaggcactggcaaaggcgttctcgtttatggctccgggcgggcgcaaccgcacgccagatgcgcgtgcggtttgctgttgtaaccccagcgccacacccacggcagccagcccgcctgctgtgcgaacgacatcgcgcagaaagcggcggcgaccattttgaggtttcgcactccgggacataatggcttacaccttctccagtttgaccgcgcacttcttgaagtccgtctctttgctgagcggatcggtcgcatccagcgtcagtttgttaaccaactgtgcggcgtcgaagaacggcatgtacaccaggccctgtggcggacggttacgaccgcgcgtttcaacaatgctgatcacttcgccacggcgagaaaccactttcactttgtcgccacggcgcagatcgcgcgctttcgcatccagcgggtgaataaacaggaccgcttccgggaaggcgcggtgcagttctggtacacggcgagtcatactgccggtgtgccagtgctccagaacgcgtccggtagagagccacaggtcgtactcttcatccggtgcttccgccgccggttcgaatggcagtgcgaagatcaccgctttgccatccggtttaccgtagaacttatagccttcgcccgctttcacgtacgggtcgttaccttcgctgtaacgccactgcgtttctttaccgttcaccaccggccagcgcagaccgcgcgctttgtggtagtcatcgaacggtgccagatcgtgaccgtgaccgcgaccaaaccatgcgtactcttcgaacagccctttttgcagatagaagcccagctcgcgggattcatcgttcagctgatcttccgccagttcggataccgggaatttgctcacttccggtgtggcatacagcacttcgtacagcgttttgccacgcagttccggtttcttcgccagcagatcttccggccatacttcttcagttttgaagcggcgggagaactggactaactgccagagatcgcttttcgcttcgcccggtgcctgtacctgttgacgccagaactgagtacggcgttcggcgttaccgtaagcgccctctttctctacccacattgcggtcggcaggatcaagtcggcggccagcgcactgactgtcggatacggatcggagacgatgatgaagttgcgcggatcgcgccagcccggcatacgctcttcattgatgttcggcccggcctgcatgttgttggtacacatggtccagtaaacattcagtttgccgtctttcagcgcacggtcttgtgccaccgcgtgcagaccgattttcgccggaatggtgccgctcgggatattccacttcttctcgcagatatcacggtgtttctcgttggtcaccaccatgtccgcaggcagacggtgagcaaaggtgcccacttcacgcgcagtaccacacgcagaaggttgcccggtcagggagaacggaccgcaacccggctgggaaattttgccggtcagcaggtgcaggttgtagaccaggttgttagcccacacgccacgagtatgctggttgaagcccatcgtccagtaggagatgactttcttgttcggatcggcatacagctgcgccagttgttctaactggtctttcggcacgccggtcatttcggcagttttttccagcgtatactcggcaacgaaggctttgtaatcttcaaagctcatcggttcggaggcgtcagaacccggattcttcgctgctttttccagcggatgggtcggacgtaaaccgtagccgatgtccgtcgcccctttgcgcaggttaacgtgcttgctgaagaagtcctgatttatcgcattgttttgaatgatatagttggcgatgtagttcaggatcaccaggtcagattgcggcgtaaagatgatgccgttatccgccagctcgaagctacgatgctggtaggtagaaagcaccgccacggtgacgttctggttagagagacgacggttagtgatgcggctccagaggatcgggtgcatttccgccatgtttgcgccccacagcacaaacgcgtcagcctgctcgatgtcgtcatagcagcccatcggctcatccataccaaaggtacgcataaagccaactactgcgctcgccatacagtgacgcgcgttcgggtcgatgttgttgctacggaagcccgctttaaacagcttggacgcggcataaccttcccagatagtccactgaccagaaccgaacataccgatgctttccggccctttttctttcagggcggttttgaatttctcttccatcacatcgaaggcctgatcccaggtgattggggtaaattcgccttctttgtcatatttaccgtttttcatacgcagcagcggctgcgtcaaacggtctttaccgtacatgattttgggcaggaaatagcccttaatgcagttcaggccacggttaaccggtgcgtccgggtcgccctgacaggccaccacacgtccctgctgcgttccgaccagaacgccgcaaccagtaccgcagaaacggcacggcgctttatcccatttgatggcttcctgctgaccaacaacggcgcgggcaacgcccggcacgctgagaccggcagccgccgcagcggccgcaacggcgttagctttcataaagctacgacgactgagtttcatggtgtttcctcaccttgctcttcctgctggtgataaaccaggctcaccgccagcacgccctctacgttgcgtacactctcaatggtttggatcagcgtttcgctgtcttctgcttccaccaccacaatcaactgaccgctcggcgcgtcgctgacagcaacttcacagccgggaaaggcgttcagttgggtgctgatgtcactaattcgttcgcttttggcctgcacgaccaggctgcaaacttgccagttagtgtgcatggagatactccgcagttatggcacttaccggacagctggctgcacatgctccacatccgttgcaaagttggctattaagttgcggctggtagatcccggagagcgtcgggcgaaagataattgccattggctcacagctatcctgacagcggcggcattcaacactctgatacgccaggcacgcgtccccgatggtgaactgcaaatcccaggccctggtgtggcgcggagaaaataggctttcggggcaagcctgcgcgcaggcgtaacagaagctgcactcgttatttttgaaattaacgctcggatagccgcccgcgccgcgttgcagaatgttgttttcacaagcattaatacaggcgtcgcagcgggtgcaatgggtcagaaaatgagattcatcaccggaccagggcggacggataccgttactggctttgcgccagcgaccagtgagtatgccccgacgggatgcatcaatcttcacattgaccttccatcattaacgcgctctgaaaattgagagcgaccaaataaaccgcataattaataagccatttttatagccgctaagatattaaaggatgtgtcaaagatgcataccccgatcggggtaaaacctgtagcaggatcaaaagagtggcgggaagcgtggcaaaaacgggcttttgctcacatttcaaatggttataaatatatttatatagcgattgattcaccagagatatttctgctggtttgctctctcattagaatttaacactaaaagagcaggtaaaattgtctgaatgttctttaagttattcataaagcaaattaataaatctgatgaatatgttaaccttcagcgacatcatcggtgaaaacctataaatgaagaaggaaagcaaaaaaatgaagaccattctacctgcagtattgtttgccgctttcgctaccacttccgcctgggcggcagaaagcgtccagccactggaaaaaatcgcgccttatccacaagctgaaaaagggatgaagcgtcaggtgattcagttaaccccgcaagaagatgaatctaccctgaaagtagaactgttaatcggtcagacgctggaagtcgattgcaatttgcatcgtctcggcgggaagctggaaaacaaaacgctggaaggctggggctatgattattatgtctttgataaagtcagttccccggttagtacgatgatggcctgcccggatggcaagaaagagaagaaatttgtcaccgcgtatctgggcgatgctggaatgctgcgttacaacagcaagctgccgatcgtggtgtatacgccagacaatgtagatgtgaagtaccgcgtctggaaggcggaagagaaaattgacaacgcggtagttcgctaaactgccgtgaagtgcggcaccccgtaggtcagacaaggcggtcacgccgcatccgacatccaacgcccgagccggttgcctgatgcgacgctggcgcgtcttatcaggcctacaccgctgtgaagtgcggcaccccgtaggtcagacaaggcggtcacgccgcatccgacatccaacgcccgagccggttgcctgatgcgacgctggcgcgtcttatcaggcctacaccgctgtgaagtgctccaccccgtaggtcggataaggcggttacgccgcatccgacatctaacgcccaagccggttgcctgatgcgacgctggcgcgtcttatcaggcctacaccgctgtgaagtgctccaccccgtaggttggataaggcggttacgccgcatccgacatccaacgtccgagccggttgcctgatgcgacgctggcgcgtcttatcaggcctacaccgctgtgaagtgctccaccccgtaggtcggataaggcggttacgccgcatccgacatctaacgcccaagccggttgcctgatgcgacgctggcgcgtcttatcaggcctacaccgctgtgaagtgctccaccccgtaggttggataaggcggttacgccgcatccaacatctaacgcccgagccggttgcctgatgcgacgctggcgcgtcttatcagcatacgccacatccggcataccatgccggatgtggcgtatcattacaacgcaatatccgccacttctttttgaacgggttgcggtttcaactgcggtttcggcgtactatctgctgcctgcggcttgtcgtagttcaaccccagcacttcgctggtgtactgcaactcgcgttctgttgccgctacatcaccgttcagcttgcgtccataagacggaacgatcgctttcaacgtagcctgccattgcgggctggaaacacgatcgccaaatactttttccagcagattcaacataatcggcgcggcggtactcgcccctgggcttgcccccaggagcgcggcaatggttccttgctggtcactgacgacttcagtacccagacgcagtacgccacctttctcggcatcacgcttgataatctgcacgcgctgccccgcttgccacaaacgccagtcctcttttttcgcctgcggatagtactctttcaacgcttcaaaacgatcctcttcactcaacatcacctgactcaccagatatttcaccagatcgaaattatccagcccgacgtgcatcatcggcatcacgttagaggtggtggtggaactcattagatcccacaaactaccgtttttgaggaatttggtactgaaggtggcaaatggcccaaacagcactacgcgtttaccgtccagaacgcgggtatcgatatgcggaacgctcatcggtggtgcgccaacggatgctttaccgtaaaccttcgccagatggtgattaaccacgtccgggttttcgctaacaaggaactgtccgcccaccgggaaaccggcgtagtctttcgcttccggaatcccgctttcctgtaacagcttcagcgccgcaccgcccgcgccgataaagacaaatttggcacgaatgttctgtgcagtgccatttttcagatcggcaacggtaacggtccaggtgttatcgtcattacgctttagggcgcggacttcgctgctgagttgcaggctgaagttagatttcttctgcaaggaagcaattaactggcgggtgatctcgccgtagttcacatcggtaccaatttccgtacgcgtggctgccactttctgttgcggatcgcgcccttccatcactaacggtgcccactctttgatctgcgcgtgatcttcagagtaacgcataccgcgaaacaggctgctttgttgcaacgcggcgtaacgggcgcgcaggaaattgacgttatcctcgccccagacaaagctcatatgcggaacggtattgataaaactacgcggagtacgcagcacgccgcgctcaacctggtgcgcccagaactggcgggaaatctgaaatgcttcgttaatggcgactgctttttcaatactgatgctgccatcggcgttttgcggggtgtagttcagttccatcagtgcagaatgcccggttccggcgttattccagccgttgctactctcctgcgcgacaccctccaggcgctccaccatggtcatgctccattcaggctccagctcgcgtaaataggtccccaacgtggcgctcataatgccgccgccaatcaacagtacatcagtttcctgctcctcggacgctttcgcttttgccgccatgctaacggcattaagccccacggccatgctgaagagcatggcagtcacttttttcatcttgttaatgccttacttttagtcgctttattgcaggtgagatttgcgcggcatcaacggtaacacttaagtaacaacatttaaataatgtttataaattatattctaattttagaaacattataatttcgttgattaattatagggttattagaaatgaagggatttttagcatattgacctgacggcagcagtccgccaggtcagcgtcgtaatattatgccgtccgggcaacggcatcacggctagcggcatcgcgctcttcgcccgtcagctcgctaagttgcccattgcgcatttccagcaggcggtcggcgtggataaagtaatgatcatcatgactgatagcgaaaatagttttacccatctcctgcatcagcggcagcaacacctgataaaactcacgacggaagtgtggatcctgatccgccgcccattcatccagcaggataatatcgcgttcttctgccagcgccagcaacagcgccacgcgttttttctgccctttacttaacttcaggttaacaatacgcccgttgcttaactcaagcttatgagccattttcagctgcgccagccacttctcaaccagttgcgggttagcgggtttaccctccggccccagcagttgatcaaacagccagacatcggtaaacactgcgctaaacagtttgcgataatcttccggttgttcgccgctgacaggtttgccatccagcaagatttcgccgctttgtggctgatacaagcccgtcaacaacatcgccagcgtgctttttccgctaccgttgccgccaatcagaaacagcagctcgccacgtttgatggtgagattaatcggaccaacggaaaacgcgttatcctgataagcaaacgtcacgttacgcagctccagcgtttgccagttgggaaacgcctgcgggcgcggaaactctgctttgaaaggcgcgagcgcgaatttgttcagcttgttaaacgccacctgcgccgtcagcagcgtcggcaatgcgccaaccgcgctaagcagcggcgtacgcaggaataaaagcgtcaagctataggtcgcggcaacgttggtatcagcccaaccgaggctgttcgccatccagaacaccaggccgattgcgcccagcatcatgatgttactccagttcacggcactaagatggaaggtgtctgcgcgaataatatggtggcgatactcttgcgcatcaggaatgtagaggttgttaaacacatactcggcgcgttcccggttcagagtcagctctttgcgcccttcaagtacagtttgaaaatccgtgtacagcttgtcttcggtttcacgcagggtcgccatatgtttgtacacccgcgccaccagcacaaaaccgccccagatggtgatcgccatccagatagccgttaccagcaacattttgccgctcagcatccacagatacgccgcactaccgatagtgagaatgatcccctgcaccagttccggcagacgcacaaaagcaatggtgatattgcgcacatcgctggttaaccccgccagcaagctggcgctaccgagttgttcaatgcgctcgacgtgagtatccagaatccgcttgataaattcactacgcagtcggtaaacgaagtgatgccccaaagtggtgagcgccagttggcttccgagagtgactgccatcaacagcagcaataatcccagaaactccggcaacaccagcagactggtatccgccgtttcgataaggcgctgattgataaaagcaattaagccaatgcctaatgccgcactggcgaggcttagcgccatcacactgataaatggccagcgatactgccgccagacaagtacaagaagttccatgcagaaaacccggacaatgaattacagcccgcagtttaaacatcttcgcgcgcacagcaataataattcttatttttattcttttttacctgcctgacggaatgtcaggttgtagcggcagtcgatggtgagtggatgaaaccccgctttcaacggttgaataccgtgataaaacagccggctttcaccgccccataccaccacatcgccatgttccaacaacaaacgtttgagcggatcatttcgtttcaggccgccaaattgaaaaatcgcgggtaagcccagagaaacagaaacaattggcgcgcgcagatccggttcgtctttatcctgatgcaggctcagtttcgcgccaggagcgtagcggttgataagacaagcatctggctggaaatctggatagcccgccgccgtagccgcacgttgacataaattatgaaaactctgtggcatggcgggccacggtttatttgtttgcggatcaatggggctatagagataaccttgccgatgggtcgtccagcccagatgcccacagttggtcatcgccacgctcatggtatatcccccgggggtgaccatctggcgaaacgggctctggctggcaacgtcattaatatcgcggatcagttgctccgcagcgttaaaagcaaaacgccgtaaaattaccgcaccagccgccagtggctcttgccacggttcagcatcggcaaacagatccaacattacctctcctcattttcagcttcgcggcgcagcagttgcgctttacggctcacgccccagcggtaaccggaaagtgtgccatcaccacggaccacccgatgacagggtattatgatagccagcttgttggcggcacaggcgctggcaacggcccgtaccgctttcggtttgccgatggcgttagccagttgctgataactgacggtttcaccgcaaggtatcgtgcgcagtgcctgccagacttgttgctgaaaagcagtgccgcgaatgtccagcggtaacgtcagcggcgtatcgcgttgattgaggctggcgatcacttcacgcacatgttgctgaaacatcagatcggcaggcgcgttgtcggcagcgggaaacatctgctgcaactcgctgattagtgtcgcgtcatcatcgcccagcaatatcgcgcaaatcccccgctcgctttctgccaccaggcaacgacccagctcacaatcagccagcgcgtaacgcaccgccagattttcgccaccgtgacggaattgtttagccgtcatgcccagcgtttcgtcagctttgcgatagtaactgctgctgtcggggaatccggcgttaagaatagacgtcgtcacgctctcccctttcgccaggctttcgcgcaaacggcgagcgcgccaggcctgttgccaggctttaggcgtcattccggtagtcgctttaaacaaccgatgtagatgaaatggactcatcgccacctggtcggctaaggcttccagcgttacaggcgtttcctgttccagcagtcgacacgcgtgggtgattttatccaaccgatgttgctgggcattggctttttctggctgacaacgtttgcaggggcgaaagccagcggcgagtgcctcgctggcatttgcgtagaaggagacgttttcccgcaaagcatgtctggcgcggcaagacggacggcaaaagatgcctgtggtacgcacggcgaaaacgaattcgccgtcggcattcgggtcgcgggctaagacagattgccagcgttgatcgtcagttaagcatgtggcttttttcataatcagctccctggttaaggatagcctttaggctgcccggtcaccatcacgcaaaaaccaacaatcttgcgctttaatttttttcgctgacaaggaagcttttaaactgtggactcatccaggttttaaagctatcgccttctttggtgatcatataaaccgccagcccttcccggcgaacaacctctttagctttctccggcccgagtaccatcaagccagtatcccaggcatcggcttccagcgccgtcggagcaatcaccgtcacggataccagattgtgttcgatgggacgcccggtttgcggatcgataacatgggaaagacgtttgccgtccagttcgtaatagttacggtagctgccagaggtgctaatcccatgaccgttgatatccaccacagcctgaaccgcgttttctttatcggttggtttttgaatcgctacccgccacggcaggccttcaccgttcataccacggctgttcagcgcgccgcccacgctcaccagatagcgggaaatcccttcctgctccatcaagcgtgccaaatgatcggccgcatagccttcgccgacggtggagagatcgacatataaatccggcaggtctttttgcagatattgctgatggctctgattgatgaccgtcaggtgctgtaagccggttttggctttcatcgcatcgatctgttcctggctcggaatttgaaccggctgttgttccgggccaaagccccacagattcaccagcggcccgacggttatatccatcgcgccatcggtcttcgcgccaatgcgcaggctggtggtgacgatatcggccatcgcttcacttaccggccacgggcttaaactttggctgtcgttaaagcgcatcagcgcggaatcttttttataggtgctaagcagctgatcgtcggcgtccagttgggtctgaatcttttctttaagttcggcgctgcgtttggcgtcaatgcccgggatgctggcacgccagaaggtacccatagttttgccttcaagaacggtaacttcagtagcgtgggttttggcgggttgtggtttttgatcgcaaccaacaaagaagagcgcggcagccagcagtgccacgcgggtaaagcttatttccatacgtgattatcctcatgcgaacggtcgcaagagtacaccaaaaaactgagtttgtacgctgaaaacaatgaaaaaagggcccgcaggccctttgttcgatatcaatcgagattagaactggtaaaccagacccagagctacgatgttatcagtgttgatgccagcgtcacgagtgaactggttgtcgtccagcaggttgattttgtagtcaacgtaggtggacatgtttttgttgaagtagtaggtagcaccaacatcaacatatttcaggatatcttcgtcgtcgtagccacgacccaggtttttacctttagactgcaggtaagccagggacggacgcagaccgaagtcgaactggtactgagcaacagcttcgaagttctgtgctttgttcgcccaacccagggaacctacgcgagttgcgttgtaggtctgggtgtactgagcagccaggtagatgttgttagcgtcgtatttcagaccaccagtgtaggtttcagcacggtcgccgttaccgatgtaagcagcggtgttctgagcatcagtacgtttggagctggagatcgcaccaccgataccgaaaccttcgtaatcataagtgatagaaccgccgacgccgtcgccgttttgacgcagtgcgtcacgaccgttgttagttacgccactagtaaagccttcaccagatgggttgccgtttttaccctggtactgaacagcaaagttcaggccgtcaaccagaccgaagaagtcagtgttacggtaggtcgcgaagccgttaccacgctgctgcatgaagttgtcagaaccgtaggtgtcaccaccgaattctggcagtacgtcggtccaggaagttacgtcataaacaacgccgtagttacgaccgtagtcgaaagaacccacatcctggaatttcagacctgcgaatgccacacgggtccaggagttgttttcgttttcagcgctgttgccctggatctgatattcccactggccgtaaccggtcagctggtcagtaacctgagtttcacctttgaagccaagacgcatgtaggtctggtcgccatctacatctttgttgtcagagaaatagtgcaggccgtctactttaccgtacagatctaatttgttgccgtctttgttgtaaacttcagcagcgtttgctgcgcctgctaccagcagagctgggaccaggagggacagtactttaactttcatgttattaaccctctgttatatgcctttatttgcttttttatgccactgcatactgattaaccctcattaatcagtcggcaagtccattctccccaaaaatgcagaataatccaacacgaatatgatactaaaacttttaagatgtttcatttatcgctatagatgtttcaaaatgtaaatgcaagggaactttttaagattattgcggaatggcgaaataagcacctaacatcaagcaataataattcaaggttaaaatcaataacttattcttaagtatttgacagcactgaatgtcaaaacaaaaccttcactcgcaactagaataactcccgctatcatcattaactttatttattaccgtcattcatttctgaatgtctgtttacccctatttcaaccggatgcctcgcattcggttttttttacccttctttacacacttttcattattctgtgctaccacagaaaaactataacgcttgttaactatttcacaaataattaacatccgcataatttccagcaatctttgtttatttgcaattatttttgttgggctttttgtaggttatttgtacagcaaaatggcgcttgtacatctatttcccccaatgcaggatgataaatatcacgggagaatagagaatcatcaatcaggtaagagtctggaatttcacactgtaccctttatactgccctatcacttcgcgaagttttaacaggtcataaacacgaatgcgtcagaaagagacaacggccacgacccgctttagtctcctaccggggagcattacccgcttctttttactgttgatcattgtgttactggtgacgatgggtgtaatggtacaaagcgccgttaacgcctggctgaaagataaaagttaccagattgtcgacattacccatgctatccaaaagcgcgtcgataactggcgttacgtgacctggcagatctacgacaacattgccgcgacgacctccccctcctccggcgaaggtttacaagagacgcgcctgaaacaggatgtctactatctggagaaaccacgccgcaaaacggaagcgttaatctttggctctcacgacaacagtacgcttgagatgactcagcggatgtccacttatctggatacattgtggggcgcagaaaatgtaccgtggagcatgtattacctgaatggtcaggataacagtctggtgctgatcagtaccctaccccttaaagatctcacctccggatttaaagaaagcaccgtcagcgacattgttgatagtcgtcgtgcagagatgttgcaacaggccaacgccctcgatgaacgcgaaagcttttctaacatgcgccgcctggcctggcagaacggtcattactttacattgcgtactacctttaaccagccaggacatctggcaacggtcgtggcttttgatctgccgattaatgatttgatcccaccgggtatgccgctggacagtttccgccttgagccagacgcgacggcaacgggaaacaatgataatgagaaagaagggacggatagcgtcagtatccactttaacagtacgaagattgaaatctccagcgcactcaactctaccgatatgcgcctggtctggcaggttccttatggcaccttattgctggatacgttgcaaaacattctgctgccactgctgctgaacatcggtttgctggcgctggcgttatttggctataccacattccgccatttctccagccgcagtacagaaaacgtccccagcacggcggtcaataacgaattgcgcattttacgggcaatcaatgaagagatagtcagtctgctgccgctcggcctgctggttcacgatcaggaaagcaaccgcactgtcataagtaacaaaattgccgatcatttgctgccgcatttgaatctgcaaaacatcaccaccatggcggaacagcatcaggggattattcaggcgacgatcaataacgagctgtatgagatccgcatgttccgcagccaggtcgcgccgcgcacacaaattttcattattcgcgatcaggatcgcgaagtgctggtaaacaagaaactcaagcaggcgcagcgtctgtatgagaaaaaccagcaggggcggatgatctttatgaaaaacattggcgatgcgctgaaagaacccgcacagtccctggcggagagcgcggctaaactcaacgccccggaaagcaaacaactggcgaatcaggcagatgtgctggtgcggctggttgatgaaatacagttagcgaacatgcttgcggatgatagctggaaaagtgagacggtgctgttctccgtgcaggatttaattgatgaagttgtgcctagtgtgttgcctgccatcaagcgtaaaggtctgcaactgctgattaacaatcatctgaaagcacacgatatgcgccgcggcgatcgcgatgccttacgacgtattttgctgctactgatgcaatatgccgtgaccagtacgcaattgggaaaaatcacccttgaggttgatcaggatgagtcctccgaagaccgcctgacgttccgcattctggacacgggagaaggcgtaagtattcatgaaatggataatttgcacttcccgtttatcaaccagacccaaaacgatcgctatggcaaggcggacccgctggcattctggctgagcgatcaactggcacgtaaactgggcggtcatttaaacatcaaaacgcgggatgggcttggtacacgctactctgtgcatatcaaaatgctcgcagctgacccggaagttgaagaggaagaagagcgtttactggatgatgtctgcgtaatggtggatgttactagcgcagaaattcggaatattgtcactcgccagttagaaaattggggtgcaacctgtatcacacccgatgaaagattaattagtcaagattatgatatctttttaacggataatccgtctaatcttactgcctctggcttgcttttaagcgatgatgagtctggcgtacgggaaattgggcctggtcaattgtgcgtcaacttcaatatgagcaacgctatgcaggaagcggtcttacaattaattgaagtgcaactggcgcaggaagaggtgacagaaagccctctgggcggagatgaaaatgcgcaactccatgccagcggctattatgcgctctttgtagacacagtaccggatgatgttaagaggctgtatactgaagcagcaaccagtgactttgctgcgttagcccaaacggctcatcgtcttaaaggcgtatttgccatgctaaatctggtacccggcaagcagttatgtgaaacgctggaacatctgattcgtgagaaggatgttccaggaatagaaaaatacatcagcgacattgacagttatgtcaagagcttgctgtaacaaggtagcctattacatgaacaatatgaacgtaattattgccgatgaccatccgatagtcttgttcggtattcgcaaaagtcttgagcaaattgagtgggtgaatgttgtcggcgaatttgaagactctacagcactgatcaacaacctgccgaaactggatgcgcatgtgttgattaccgatctctccatgcctggcgataagtacggcgatggcattaccttaatcaagtacatcaagcgccatttcccaagcctgagcatcattgttctgactatgaacaacaacccggcgattcttagtgcggtattggatctggatatcgaagggatcgtgctgaaacaaggtgcaccgaccgatctgccgaaagctctcgccgcgctgcagaaagggaagaaatttaccccggaaagcgtttctcgcctgttggaaaaaatcagtgctggtggttacggtgacaagcgtctcagcccaaaagagagtgaagttctgcgcctgtttgcggaaggcttcctggtgaccgagatcgctaaaaagctgaaccgcagtattaaaaccatcagtagccagaagaaatctgcgatgatgaagctgggtgtcgagaacgatatcgccctgctgaattatctctctagtgtgaccttaagtccggcagataaagactaatcacctgtaggccagataagacgcgttagtgtcttatctggcatttgcaccgattgccggatgcggcgtaaacgccttatccggcctacgattcccattatttcaacaaattacattaaagtaggccagataagacgcgtcagcgtcgcatctggcatttgcactgaatgccggatgcggcgtaaacgccttatccgtcttagctatcccggcttttcctgaccctctcggcatataacgtcagcgtctgttttatcacatccagcgttaccggcttgctcaggcagctgtccataccggactccagacaccgctgcttctcttcagccaacgcattagcagttactccgattaccggcaacgtcagtcccaactgacgaatgcgttgcgtcaagcggtaaccatccatatttggcatgttgacgtcgctaagcacgatatcaatatgattcttgctaagtacattaagcgcatcgacgccatcattcgcggttttacattgatagcccaagcttcccaactgatctgccagcaaacgccggttaatcggatgatcatccacgaccagaatcatcatatcgtcattatcgctgaccgctttgtccgtactcggcagagcgttagcaggatcgtcgctctccatctcgatcaaataaatacgcgccaacaatgccggtagctcatgcggagcagccacactgtgtacccactcccctggcgctttctccagcggaataccaatatggcgacgacagaaggtcactaccgctctgccctgccattttttactcactacctcgtcagtgatcaacacatcttcgggagtcggttcctgcccttcgtatgttgtaacgacgatgccgctgcgctgcaaactggtttccaggaactgacagaggctcgcattgcggaccgccagccagcagcgtttaccactcaacccttccacgccttttttctgcgggtactgagcgccgtacaacggaatacgcacggtaaactggctgcccattcccggttcactatctacgctgatatcgccgtccatcatgctgatcagtttttcacaaatcgccagacccagaccggtcccctggaaattacgctgtacgcccgttccgacctggaagaagggatcaaacaagcgcaccacttctttcgccggtatccccacgccggtatcgcgaacacggatagagagataatcgccatccgcgcgaacatgcaaaactatacagccggtatcggtgaattttatggcgttactcaacaggttggagatgacctgctgtaaacgcatcgggtcgccatttaaggccactggcacatccggttcaataaagcagtacaagcctaactgcttgcgtaccaccagcggtaaatagttggcggtgatgtggttcatcacttcacgcggactaaactcacgcggttcgatcttcaactgttcgctttcaatcttgctgaaatcgagaatatcgctgataattttcaacaacaggctggaagagttgttcattgccgtcaccagccgatcgacgcctttcggtaactctttggtttgcaacagatccaggttaccgataatgccatacagcggcgttcgcagctcatgactgacggtggcaaggaacatgcttttactctggctcgcctgttccgctgcttgtgccatctcctgcaagctctcttccatcttcacgcggctagaaacatccaccagcacacaaatggccacgttttcattacgatagcggctatggacgaagctgatttgcagattggtattgttgctggtcaggacatcaacaaaattgacctgctgcccacagataatttgcgtcagtcgttggcggtcctcatgcgtaagcatattgagataggtatgcgccagttcgttacttaaaatattgacgccatcagcggtacgcaaaatgcagatacccactggcgcggaggcgacaatcttgcgattgaactgctcatgttcttccagtcgcagggcgtcgctttccgccggaatgaaaatacgtcgctcgtacatccgtgcgagagtaaacaatgcagctccggcaagcacattcagcaaaattgcgttaaggatcaacatgcgaatgcgttccagcaccttatcaaccggcacgctatacacgatgcttaggctactgggtggcagatttttcttcagcaccagctcccggaacccttccgtatagccaaaccaggagcgttcctgcatccagcgaggatcgcccttaattttactttctggtccggtaaggctaatcagggtatgaccattttcatcaagaatggtaacccccatcggcaacgtacccggtaagaaaaagttctccatccggatggtctgctcgacacccaaaagcgcctgcaaccggttcgccagataaactggcgtcaacgcgtaaaaatacccgacgccagggcgcggaccttcgctgatccagtagaggttactgccgctatcatcttgtggtgcatttcgatatttattgatgcgttcatgcaaagctttcaacgcggtatcgcgttccactggcatatcacgcagaccgaaattggccatgcagaggttatcgctgccgattaaaaatacccggtttagatcgtaagccgcagaaaaattatcgcgccagtagcgcataaaccacgccaaactctccagagaacctcgccaggtgttactcattgcggaacaatcggagtcggcaaacagcggttcaaacgcaggcacatccgcctgcgtttctcgtccacgcggggaaagcacaccgttttctgcgcttaagcgattttcggcgatgtacttcagctctttcatcacatcagaggtgcgttgaataaagcgctgagcctgatcggaactcagattaaattcctgacgaatttcgctttctcgctgatgtaacgcattaacgatgtaaaaaacggaactaaaagcaatcaacagccagagcactaacgccaatgctctgaacatgtagcggctggctttcagggttgtacgaaaagaagcaaggtatttcaaaggggcgaagctccgcctcaggtgaccgatggagtgtggttaaggtagcggtaaaagcgtgttaccgcaatgttctctcttctctggaatatgatacaccgccgagaaatcatcaccttaacctctgataatcgtcatataccggacaagactagtggatttcagcatgcattatatgaagtggatttatccacgccgcttacgcaatcaaatgatcctgatggcaatcctgatggtcattgtcccaacgcttactattggttatatcgtagaaacggaaggacgtagtgcagtcttatctgaaaaagagaaaaaactttctgccgtggtcaacctgcttaatcaggcactaggcgatcgctatgatctctacatcgacttaccacgtgaggagcgtatccgcgcattaaatgcagaacttgcccccattaccgaaaatatcactcacgccttccctggcatcggtgctggttattacaacaaaatgctggatgcgataatcacctacgcgcctagtgcgctatatcagaataatgtcggcgttaccattgccgcagatcaccctggtcgcgaagtgatgcgtacaaatacccctttagtttatagtggcaggcaggtgcgcggcgatattttgaatagtatgctccccattgagcgtaatggtgaaatcctcggctatatctgggccaatgaattaaccgaagatattcgccgccaggcctggaaaatggatgtgaggattatcattgtgctcaccgctggtttgctgataagcctgctgttgattgtccttttctcccgtcgcctgagcgccaatattgatatcatcaccgatggcctcagcactctggcacaaaatattcccactcgattaccacaattgcccggtgaaatggggcaaatcagtcagagtgttaataacctcgcccaggcactgcgtgaaacgcggacacttaacgatctgattattgaaaacgctgccgatggcgtcattgccattgaccgccagggtgatgtaaccaccatgaacccagcagcagaagttatcactggctatcaacgccatgaactggtagggcagccttactccatgttgttcgacaatactcagttctacagtccagtactggatacgctggaacatggcaccgaacatgtggcgctggagatcagttttccaggtcgtgaccgcaccattgaactcagtgtcactaccagtcgtattcataacacgcacggtgaaatgataggtgctttggtgattttctctgatttaactgcccgcaaagaaacccagcgccgcatggcgcaagcagaacgcctcgccacactgggtgagctgatggctggcgtcgcgcatgaagtacgtaatccgttaacggctattcgtggttatgtacagatcttgcgccaacaaaccagtgacccaatacatcaggaatatctgtccgtagtactcaaagaaatcgatagtattaacaaagttattcagcaattgctcgaatttagtcgtccacgccacagtcaatggcaacaagtcagcctcaatgcattggttgaagaaactctggtactggtacaaaccgccggcgtacaagcgcgggtcgacttcataagcgaactggataatgaattaagcccgattaacgccgatcgtgaactgctcaaacaggtactactgaatatcctgatcaatgccgtccaggctatcagcgcacgagggaaaattcgcattcaaacctggcaatacagcgacagtcaacaggccattagcatagaggacaacggctgtggcattgatctcagcctgcaaaaaaagatcttcgatccctttttcaccaccaaagccagtggaaccgggcttggtctggcgttaagtcaacgcatcattaatgcccatcagggtgatattcgcgtcgccagtttgccgggctacggcgcaaccttcacgcttattttaccgatcaacccgcagggaaatcagactgtatgactgctattaatcgcatccttattgtggatgatgaagataatgttcgccgtatgctgagcaccgcttttgcactacaaggattcgaaacacattgtgcgaacaacggacgcacagcattacacctgtttgccgatattcaccctgatgtggtgttgatggatatccgcatgccagagatggacggcatcaaggcactaaaggagatgcgcagccatgagacccggacacccgttattctgatgacggcctatgcggaagtggaaaccgccgtcgaagcgctacgctgcggagccttcgactatgttattaaaccgtttgatctcgatgagttgaatttaatcgttcagcgcgctttacaactccagagtatgaaaaaagagatccgtcatctgcaccaggcactgagcaccagctggcaatgggggcacattctcaccaacagcccggcgatgatggacatctgcaaagacaccgccaaaattgccctttctcaggccagcgtcttgattagcggtgaaagcggcaccgggaaagagttgattgccagagcgattcactacaatagccggcgggcaaaggggccgttcattaaagtcaactgcgcggcgctgccggaaagcttgctcgaaagtgaactgtttggtcatgaaaaaggtgcatttactggtgcacaaaccttgcgtcagggattatttgaacgagccaacgaaggtactctgctcctcgacgaaattggcgaaatgccgctggtactacaagccaaattactacgcattctacaggaacgggaatttgaacggattggcggccatcagaccataaaagttgatatccgcatcattgctgccaccaaccgcgacttgcaggcaatggtaaaagaaggcaccttccgtgaagatctcttttatcgccttaacgttattcatttaatactgccgcctctgcgcgatcgccgggaagatatttccctgttagctaatcactttttgcaaaaattcagtagtgagaatcagcgcgatattatcgacatcgatccgatggcaatgagtctgcttaccgcctggagttggccgggaaatattcgagagctttccaacgttattgaacgcgccgtcgtgatgaatagtggcccgatcattttttctgaggatcttccgccacagattcgtcagccagtctgtaatgctggcgaggtaaaaacagcccctgtcggtgagcgtaatttaaaagaggaaattaaacgcgtcgaaaaacgcatcattatggaagtgctggaacaacaagaaggaaaccgaacccgcactgctttaatgctgggcatcagtcgccgtgcattgatgtataaactccaggaatacggtatcgatccggcggatgtataacaccaaaacttgctatgcagaaatttgcacagtgcgcaattttctgcatagccgctcattctccttataaatccccatccaatttatcccttcatattcaattagttaaataactaaatccaataatctcattctggcactccccttgctattgcctgactgtacccacaacggtgtatgcaagagggataaaaaatgaaaacaaaattgatgacattacaagacgccaccggcttctttcgtgacggcatgaccatcatggtgggcggatttatggggattggcactccatcccgcctggttgaagcattactggaatctggtgttcgcgacctgacattgatagccaatgataccgcgtttgttgataccggcatcggtccgctcatcgtcaatggtcgagtccgcaaagtgattgctagtcatatcggcaccaacccggaaacaggtcggcgcatgatatctggtgagatggacgtcgttctggtgccgcaaggtacgctaatcgagcaaattcgctgtggtggagctggacttggtggttttctcaccccaacgggtgtcggcaccgtcgtagaggaaggcaaacagacactgacactcgacggtaaaacctggctgctcgaacgcccactgcgcgccgacctggcgctaattcgcgctcatcgttgcgacacacttggcaacctgacctatcaacttagcgcccgcaactttaaccccctgatagcccttgcggctgatatcacgctggtagagccagatgaactggtcgaaaccggcgagctgcaacctgaccatattgtcacccctggtgccgttatcgaccacatcatcgttagtcaggagagcaaataatggatgcgaaacaacgtattgcgcgccgtgtggcgcaagagcttcgtgatggtgacatcgttaacttagggatcggtttacccacaatggtcgccaattatttaccggagggtattcatatcactctgcaaagcgaaaacggcttcctcggtttaggcccggtcacgacagcgcatccagatctggtgaacgctggcgggcaaccgtgcggtgttttacccggtgcagccatgtttgatagcgccatgagttttgcgctaatccgtggcggtcatattgatgcctgcgtgctcggcggtttgcaagtagacgaagaagcaaacctcgcgaactgggtagtgcctgggaaaatggtgcccggtatgggtggcgcgatggatctggtgaccgggagccgcaaagtgatcatcgccatggaacattgcgccaaagatggtagtgcaaaaattttgcgccgctgcaccatgccactcactgcgcaacatgcggtgcatatgctggttactgaactggctgtctttcgttttattgacggcaaaatgtggctcaccgaaattgccgacgggtgtgatttagccaccgtgcgtgccaaaacagaagctcggtttgaagtcgccgccgatctgaatacgcaacggggtgatttatgattggtcgcataagccgttttatgacgcgttttgtcagccggtggcttcccgatccactgatctttgccatgttgctgacattgctaacattcgtgatcgcgctttggttaacaccacaaacgccgatcagcatggtgaaaatgtggggtgacggtttctggaacttgctggcgtttggtatgcagatggcgcttatcatcgttaccggtcatgcccttgccagctctgctccggtgaaaagtttgctgcgtactgccgcctccgccgcaaagacgcccgtacagggcgtcatgctggtcactttcttcggtagtgtcgcttgtgtcatcaactggggatttggtttggttgtcggcgcaatgtttgcccgtgaagtcgcccggcgagtccccggttctgattatccgttgctcattgcctgcgcctacattggttttctcacctggggtggcggcttctctggaagtatgcctctgttggctgcaacaccgggcaacccggttgagcatatcgccgggctgatcccggtgggcgatactctgttcagtggttttaacattttcatcactgtggcgttgattgtggtgatgccatttatcacccgcatgatgatgccaaaaccgtctgacgtggtgagtatcgatccaaaactactcatggaagaggctgattttcaaaagcagctaccgaaagatgccccaccatccgagcgactggaagaaagccgcattctgacgttgatcatcggcgcactcggtatcgcttaccttgcgatgtacttcagcgaacatggcttcaacatcaccatcaataccgtcaacctgatgtttatgattgcgggtctgctgctacataaaacgccaatggcttatatgcgtgctatcagcgcggcagcacgcagtactgccggtattctggtgcaattccccttctacgctgggatccaactgatgatggagcattccggtctgggcggactcattaccgaattcttcatcaatgttgcgaacaaagacaccttcccggtaatgaccttttttagttctgcactgattaacttcgccgttccgtctggcggcggtcactgggttattcagggacctttcgtgatacccgcagcccaggcgctgggcgctgatctcggtaaaagcgtaatggcgatcgcctacggcgagcaatggatgaacatggcacaaccattctgggcgctgccagcactggcaatcgccggactcggtgtccgcgacatcatgggctactgcatcactgccctgctcttctccggtgtcattttcgtcattggtttaacgctgttctgacggcacccctacaaacagaaggaatataaaatgaaaaattgtgtcatcgtcagtgcggtacgtactgctatcggtagttttaacggtagtctcgcttccaccagcgccatcgacctgggggcgacagtaattaaagccgccattgaacgtgcaaaaatcgatagtcaacacgttgatgaagtgattatgggtaacgtgttacaagccgggctggggcaaaatccggcgcgtcaggcactgttaaaaagcgggctggcagaaacggtgtgcggattcacggtcaataaagtatgtggtagcggtcttaaaagtgtggcgcttgccgcccaggccattcaggcaggtcaggcgcagagcattgtggcggggggtatggaaaatatgagtttagccccctacttactcgatgcaaaagcacgctctggttatcgtcttggagacggacaggtttatgacgtaatcctgcgcgatggcctgatgtgcgccacccatggttatcatatggggattaccgccgaaaacgtggctaaagagtacggaattacccgtgaaatgcaggatgaactggcgctacatagtcagcgtaaagcggcagccgcaattgagtccggtgcttttacagccgaaatcgtcccggtaaatgttgtcactcgaaagaaaaccttcgtcttcagtcaagacgaattcccgaaagcgaatagtacggctgaagcgttaggtgcattgcgcccggccttcgataaagcaggaacagtcaccgctgggaacgcgtctggtattaacgacggtgctgccgctctggtgattatggaagaatctgcggcgctggcagcaggccttacccccctggctcgcattaaaagttatgccagcggtggcgtgccccccgcattgatgggtatggggccagtacctgccacgcaaaaagcgttacaactggcggggctgcaactggcggatattgatctcattgaggctaatgaagcatttgctgcacagttccttgccgttgggaaaaacctgggctttgattctgagaaagtgaatgtcaacggcggggccatcgcgctcgggcatcctatcggtgccagtggtgctcgtattctggtcacactattacatgccatgcaggcacgcgataaaacgctggggctggcaacactgtgcattggcggcggtcagggaattgcgatggtgattgaacggttgaattaatcaataaaaacacccgatagcgaaagttatcgggtgttttcttgaacatcgacggcgaaggtaaccccattaatcaccagtcaaaacttttcaccagcgtcagctcgccagcattacgcatcggtacaataaatgtttcctgtttctcattgacgcttccttcatcggtgatcagcgtcagttgggcggtggttaattccgtttcgctgcgcccaccatagtagttgatatacacctgatagcgcccgtgaattggcgcgggcatggcgaaaatctcgggtccgtaccccgtcgtgacatccatatccagtgcaccactgtttttcagcacggtgttaccgtaccaggcgtgttcgccatcgggcgtaacaacgtgaaggtcgaggtcggtattgtccgtatcccagctgagaaccagccgtaaacgtgcacgaatcgttcctgtacccggcgtactgtaaaactgcattttttgtcggctttgcccatccgggctgatgacctgcacgctgttgctgccttcagtgaaaatataagggcgtgcaaaactaccatcggattcaattctctgcggcatactggcaccgttgaccaccagccggccctgctgaactttacccgccgcagcataattctttattttgccgcggatctgcgcactgatattttgatcatctgccatgttgacggagctcgccgggtaattgatgctttgactaaaactggcatcttcgccctctgccggatgccagccactgagcggtgcatcaatctcgacttcctgcacaccttcactgtgagcgacagggctaagcgccaccagtaacaacggaagaaaaatctttcgcatagcattagtccattaataattgtcgggtcagcgtttcgatatagttctcatcaagcccggtgggataaccatcaaaggccaggtgcagatactcatgggttaaatccagccgatcctgaagcgtaaagaagttacgaataaacagccgtttctgctgccgatcggtataggggaaaccactgactaaacggcaaaccgcaaacacgtctggttcgttgtaccccgtctcagcttgtaatatacgccgccactgcggcatttttttcgccagccaggctttcgctttgggtaataactggcaggtactgcgtggcgctccccagcggctaagactgttgtcgggataagcaaacgcgagtatctgatcgtaacgctctccctgccccgcctgggccgtggcttgccgccaggaaagtgtcccttcggtagcgcgactgccatgataatgaaccggatcgcctgcatagatgagatcctgcgtccaggcggtcatcgttcgcgcccccgtggtcgctgggctagcagaaacacgctgcgtggcgctgctgtcggggatggtcaggcaatcgccttcccgattggcgttttgctgtaaaaaagtgcgaatcgccacggtcatggctttcgctgcctcagggggcgtacttttcgcctcgcgatccagaactctggcaacgtactcttcacgatcgagatggctctgcaatttcagtttgcccttttcgctcagtaaggtcgtctcaccgtggctgacaaacgtaatgtggttaccattagtaaacgtcacacgatagcgcccattaagtacgccgggatttactgccgtcgtactcttttccgctgtgattttcttcagcggatagcgggcaaacagctccacctctacacattgcccactggcaacctgcgtcggcactggcaaaacccgattaagcaccgtcgcataacgggttagtaccgttttgctggtgccactgccagtaacccacagcggtgtaccatcggttaaccagccagcaaaaccaccctgacggatttcctgtttatcatcggcaaaccagctccaggttttcacccgtacccgactaccgagcatggatgcgacaccgattttcgcctcgtccagcaccacatccagtaagacttcctgagctttgttttgcgcgggtaacgtcgctaaactatcaagcaggcttttaaccgttacgctggtttctggcttcagcgtagtcagagacgctaaccacgcaggtgcctgacgctgttgccagtattgcccccacacatctgcgccaatatgcaaccgctgcggcgcaaaatagagcccacaggaacgtaccagcgcggtatcgcgcgttatgctctccccagcctgacaacaataaacctcttccggggagtttccgcgacactggtagggctgctccggttgatgggtatcctccagccaggcgtaaacatacagtttccacaaactccctaacggcgtggtgaggctgtcaggtaatgcactgactttggtcacgccactactgctcagctgatacagttgatcgtgctgcgcaccgcgcagcaccagttgtaacggcgtctcctccgcaagtgttggcagagtaaccaacgccaatagccagacgattcagcgccagttcacttatttcacctgcatcccggtccattcactccctgccgcaacactttgctgcgcaggtgcataggaacgcacataacgagcaggaggcagaacgaattgccctttttgcgagaagcgcagcaaatggcggaaagtgaccgttcccgtcagttctttcaccggcaccatataggccagttcgcccatttcatttcgcgctttttccagcaattgcccctgctgtttcgcggcgttgggtttattgaccgaaatgccccatgttgtgcgctcaacgtcggctcccggtggcagcggtacttccacctgaccgtagcgcagaactgcatcctgctcgctggtaagcgtgatttcatcgagatacagcgcatcgctgtcaatctcattgctggtcaccggttgcagaataaagctcatctcttcttcaccagggataagccgatacaactggcgttcaacggtcaccggaatgttactttgttgagccatttttgccggctcacgtcagcggacctgcacattttgcggcgataattcgtcaccaaaagagagaatgtccggcacgccctgaccaacccaacgccagtcttcgccccctccagttaacttatgtttagcccatgcgcccgcaggcgcaggcaaaacaactggaggcattgtcgccatatatttcgccagccagttcatggccagcgcgcgctcaatagtggattgctcagcggtcaaaccacttaaaatagcggccgtctgggtagcgtcgccaccgctattaagcagcacaaccgtgtgcgccagcggctgattgctgtttgccgctttatcccacgcatattgctgaacctgtggcatcaccgtggacttcaactgcgcttttttcagcaacgtcatggttaagacgtttgccaccgcatctgccagtggagactccggtgtatcgaggatcaggctatcattgatatcgcgggtgtcttcctcagagaaatcttcagttttagttccgcgccgggcgatagcttcatccaaccctttcaacaacgttttgcacggcaaattcatctcctgcgcccatgccagcaccagcgcccgatgcaataacggcatgttatctgcctgctccgcgtagctgtcgagcatatgctgccagtattccggttgttgcgttacgccgatcgcctggctggcctgccagtcggcgtaccatgcccatgccgtaaggaaggcgtcaccattgccatcttcaccccaccaggtaaagcgcgctccgggccccgccagttgcatcagccgcagacggttatcctgaatcatctgacgaatgtcgttagcggcggcactttgatgatcggcaagcgaacgccaggcgagactgagcgggatcagacggctaccggtgttgattacgccaccccacggttcatcgactaacgcatcaagattgttgcggaaaatctcctgcggcgtttcactactttgtagccggatattgctcgcctgctcgggcaacatcagcgcgttatcgccaccaccgagcatgacatttttctgctgttcaacgggccagctgttatccacaaaagacagttttgtgctaatgctgtcctgcacttgcccattttgttgcagttctgcacttaacaagccagattgctgaatattctgcgtcagcgaaatataattcgcccctttgtgcagcgtcagcgtctggcgcatctcagcgcctgcaaatttagtcaccagcgccaccggttcgttatcctgctgactgaagataaatagtcctgccgccggtttgtcgcccacgcgatacaccgttggcatactccacttcatgtagagatttttttccgaacgcagataagcacgcccctgcccgaccagcccgtcgccgttcatcccacgcgcggtgatacgccagcgggttaacgaatcaggcatcaggaacgtgaaatacgctttgccttgtttatcggttgtgagtgacggcatccatgccgcggtatccacctcttcacgccgtggacgttcaagcatttttactcgccgctcgctgcggttagttgcgccaggcgcaaccggctcgctggagagcgcctggtcgtagctgataaacgacagactggagctggtacgcacattgttacgccccagcggatagaaaaatttgccgatattcggcgcgatttctggttgcagcgcgtagatcatttcatcgaccacgcctaccgttagctgcgcagaaacaggtttacctttcagcgacgaggttaattcgacattgaccagttcaccaggctggtaatgggttttgtccgttttcacccggatatccagctggggaacggcaactttgatcccggcgttctgaaaactgtactgaccgttacgggtatacagcaccgaaaaagtgatgttaggcgcaaaggaattgctcactggaacccgggcttcatactgggtatcgtttaaacgttgtagcgttagccagtttgccggatgcgaaagcagcgactgctgttccacgcgatcgcgttccagcgtcaataatgcttcatcaattggctccggaaaggtaatcagcatcttcgcggtttcgcctggctggtacagcgttttatccgccacgatatctaccgtaccagtatgcgccgtgctgcccttaccgctgacggcatgacttaacccagcgagaattaagccgtctttatcgcgtaatgtcagattgtagttgccaggtttagcgaaattgacggtaaaggatttgccgcctgacggtagctctccgctatggctcgtgcggtcttcgagacgcaaccattcatacgtaacaggaacctgttttgaagattccagcgcggcataacggaacacaaccgactcgccgctattactgtattgtgcggcagtacttaatgagtaatgcgccagaccgcgttcaatgaggatctctttggtggtggtgacgcgatacgccgcgccgtcactggcggagacggttaacaaatagcggctcggtttatcggcggcggggagatttaacgccacatgaccgctggcgtcggacaccgtttcgctgccttccagcgacacggggaaacgtccggcataacgcaaatcgttaccgaccattgataattgctgagcgcgcaaacttaactgcacgcgggcattttttaccggctcgccatccgggtagagcagttgcagtttgccgctgaccgcttcgccagttttgaactcttttttggcgagagctaaaccaatctcgaaatgtggcttgatgtagtttgccacgcgaaaactgctgctatagacctgattgcggtaagcaagacgtaactcataacctccggctacggcattttctggcaggcggaaacttccctgcccgccattgcgcgcatccagcgtgacattgacggtttgcaacagactgccgttggcgtccagcaccgaaagcttcgccggggcgctgacgatgggggatgaatgcaacggatcgtggaactcgcggccgatcactttaacatcgacacgatcgcctgcgcgatatagcgggcgatcggtaaaaatatacaagcgggtgttgtagatttcgctttcgtagaagaagttctcggagacaaaaacgccgccttcagcatccttacccagaatgtatgaacgttctggcgatatatgttgtaactgcaaggtaccgctgtcatcggtcacaccgcgggtcatcacgccaagaccgtcagtccacaagatctctgagccgggcttcgcttcaccctgttttttacccgcggtccacaccagaagctctttgcctgacactttgctaagcgccacggtatcggaaacaaacaccaccgtcgtcgcccgatacccaccaaccatcgcctcgacgaggtacagtcccggctcttgttggccgagaggaatataaatgttacccggctgcggcgagatgaaattgctggatgcgccttccagttttaccccttgctgcggctcgaacggtttagcctgccatagtggataacggaactgtttcaccaggggatattttttcagcggggaaaactggttgttctgtacataacgggaaggtttaataatggcattgccgagctgtaattcgggtaacgcctgagtcacattctgccgtgactgagaagagaaagtacgctgcatcacgcggcgagatttgccgtaccagttatcccacagccaggttagcgtattgttcagcccgtcgcccagatattgcggttgcaccacaatgcgatgcaggtttttctgctggcgcaaaaatgccatcgggtcaggaatacgatacaggcgaacgtccacgccgccgtactcttccatctgatagcgccgataatcacgccccggcgcttccagtcgcactttcgcctcttcactgctgctaaaactgctgtcagcaagcaaaaagaatgttcccccggcaggcggcgcatagttgctggaaggaagcgaatcatcagcattagcaagccctgttcccacaagagacagggacaagcacgctgttatcgcgccagaaaatttaaacgataaatgccaatgaaattgggattggaatcgttgggtatccatcgggtgtccttccatgtcataagttgttgcagactgactgcgcgcattccgttgtcagttttcgtggcgcttccggtgtggtagatgacgtaacgccccatccagaccattaagtgctgggcatcgccctgatcgaaaaaaatcatatcgccaggcagcgcctggtttatgtcctggccaataaactggctgttgtactgaatcaaattaatcgcggtcacataggggccggttttcccgttcccctgattccagttttgcgccagttgacgctgttcaggtgttagcgtcatctctggcggcaaatactggctagataaaccgttactttttagccatttactgtcgtgaactttcagcgtctcgttcgccgcaaatcgcaccaggcccgcacaatcctgctgataccagcgtggacttggcccctggcggagctgttcttgtgcaatgcgtacaaaccaggcgcgaaacagcccggattgttcgacattcagcatttcgctatgggcaacaacacaacacagccagcaaatcagcgccagcagcccgtgcctcatagcggctgccaggttatgggtagccactgccaggcggcaccgggttccatctgggccagcttcatgacataacgcggttgttgagataaagcgtccagcttcggcattaataaagtttgtgcggcgttataaaaaaccggttcgagattcttcggcagactggtcaacgtttcgttacgcagcagtttcgctattccttgtggattgatatagagcggaacgatgccatcagtgggtattacatccaccattgccgggcgggttttattcagtgtttgcagcgcgttattaaccagcgtgtcatcgagggagaaaagcagcgttttgttttgcatcgccaggctcacacggaaaaaataatcgctcattaattgatcgggttgcgccgcctgcgctttcggatactggccgtatcgggaactcacttcgcgacgccagatttgcgcttcgccctgctgagtctggcttaccggcaaaacaccttctggcgctttgctttcgtgcgcaccaatattttgcgtaaacagtttccctggcaattgcgcctgttcggcagtgccatcaaactgaccgacaaacagcggggtttgcaatttactgtcttcataccagcacagccccgcggcaccgtctaacgccccattcagcttgtcgttttcctggctgatgtggctaagcatctcttcggcaataccgtgactatacggcaccgccacacagaagctggctccggcaggcatactgttccataccggcgtaaaatcgaaactggcatctacgctggcggattcatcatttaacgccacaaaactgtgccagccgtcgttacccatttcgaagcgtacgccagcaaaagaaggcattaaccgctggtagccaaaccccagccacctggcgctgactacgatgcgctggcgtactggcgttttttcggcagtacgctcttccaggccaaagcttgcttgccagcgttttttgccgctcaacaaatcacctgcgatcgccgtggcttcggtatcctgctgatcatctttaaacaacatatccgtgctggaaaacaccagcatcttgtcctgataagtcgcgaacatcagggcgttattgccgttatagcgcaactgataaacaggaacagtttcactatttatcttgatgctactgatttccgttttgcttaactggctgtcgctggtagcggcaaacaacaatggctccagcagtttgcttaaaccactgcgctggatcagcaccatataatgactaagatggccttgtttatcgtgccacagcgctgcctgcgcgggctgatctaagagactgctaaagagcttatctttcagcgtgagatcgtgttcatagacaatacgacgaatgctgccttcaatgcccagacgatcggcatgattctgataatagaaaacgaaatcttcgctcagaacatcgtggagaaacggaatggtgaggagatctttgggaagctggctcagagagtcgctgtcgagaaagaggtccggctcattgagatcgatttgcagattgttgtgcaccaccagcgggctcaacgttttttctggcccactgccagcatattgcaacgcccagacgccagcggaaagcagtgctattgcgccaaaacctacaagaccatagaaccgccagcctttcgccttttttcaccactcattgccacattccttgtgtatagccagccattttttacgggcacagccaaactttaccgtgccctaatacgacaaaagcccagactttgcagcctggacttttcaattcaaacaagggagatagctcccttttggcatgaagaagtaaaattattcttcttctggctcgtcgtcaacgtccacttccggagcgatttcatcgtccccttccgcggcactgccgtcgatggtatccagatcttcctcgtcaaccggttcagcaacacgttgcagacccactacgttttcatcttccgcagtacggatgaggatcacgccctgggtgttacggcccacgatgctgatttcgctaacgcgagtacgtaccagcgtaccggcatcggtgatcatcatgatctggtcgcagtcatctacctgtaccgcgccaacaactaaaccgttacgttcggtaaccttgatggagataacccctttcgtcgcacggctcttggttgggtattccgccactgcggtacgtttaccgtaaccgttttgcgttgcggtgaggattgcgccatcgccacgaggcacgatcagagagacgactttatcgccttcacctaagcgaataccgcgaacaccggtggtgttgcagcccatcgcacggacagaagactctttaaagcgcaccactttaccttcagcggagaacagcattacttcgtcttcgccgctggtcaggtcaacgccgatcagctcatcgccgtcaaccagtttgatcgccactttaccggcggtacgcagacggttgaactcggtgaggacagttttcttcacggtaccgttagcggtcgccatgaagactttcacgccttcttcaaactcggtcactggcaggatcgcagtgatacgttcgtcctgctccagcggcagcaggttgacgatcggacgaccgcgcgcgccacgagtggcttccggcaactgataaactttcatgctatagacgcgaccacggctggagaagcacagaatatggtcgtgagtgttcgccaccagcagtcggtcgataaagtcttcttctttaatacgtgcggcagatttacctttcccgccacgacgctgcgcttcgtattcagaaagcggctgatacttaacgtagccctggtgagagagcgtcacgaccacatcttcctgggtgatcagatcttccaggttgatgtctgcgctgttggcggtgatttcagtacgacgtttgtcaccgaactgttcacgaaccagctccagctcttcacggatcacttccatcagacgatcggcgctaccaagaatacgcaacagttccgcgatctgatccagcagctctttgtattcgtcgagcagtttttcgtgctcaagaccggtcagtttctgcaaacgcagatccagaatcgcctgagcttgctgttcggtcaggtagtacagaccatcacgcacgccgaactctggctccagccattccggacgcgcagcatcgtcgccagcacgttcgagcatcgcggcaacgttgcccagctgccacggattagcaaccagcgcagttttcgcttctgcaggcgtcggcgcatgacggatcagttcgatgatcgggtcgatgttcgccagcgccacggctaatgcttcaaggatatgagcacgatcgcgagctttacgcagttcgaaaatagtacgacgggtcaccacttcacggcggtgacgaacaaacgccgcgatgatgtctttcaggttcatgatcttcggctgaccatggtgcaatgccaccatgttgataccgaaagaaacctgcaactgggtctgggagtagaggttgttgagcacaacttcaccgaccgcatcgcgtttcacttcaatcacgatgcgcataccgtctttgtcagactcgtcacgcagcgcgctgatgccttccacgcgtttttcttttaccagttccgcaatcttctcgatcaggcgcgctttgtttacctgatacggaatttcgtggacgataatggtttcacgaccggttttggcgtcaacttccacttctgcgcgagcgcggatatacaccttgccgcgaccggtacggtaagcttcttcaataccgcgacgaccgttaatgattgccgccgtcgggaagtccggccccgggatgtgttccatcagcccttcaatgctgatgtcttcatcatcaatatacgccagacaaccgttgatgacttccgtcaggttgtgcggcgggatgttggttgccatacctacggcgataccggaagaaccgttcaccagcaggttaggaattttggttggcatgacgtccggaattttttccgtgccgtcatagttatcaacgaaatcgaccgtctctttttcgagatcggccatcagttcatgggcaattttcgccagacggatttccgtataacgcattgccgccgcagagtcgccgtcgatagaaccgaagttaccctgaccgtctaccagcatataacgcaggctgaatggctgcgccatgcggacgatcgtgtcatagaccgcgctgtcaccatggggatggtatttaccgattacgtcaccaacgacacgggcagattttttataggctttgttccagtcattgcctagtacgttcatggcgtaaagtacgcgacggtgtaccggcttcaggccatctcggacatctggcagcgcacggccaacaatgacgctcatcgcataatccagataggagctcttcagctcttcctcaatgttgaccggtgtaatttctctcgcaaggtcgctcatctaaccgctatccctctactgtatcccggattcaaaggtcgcaaattataacacagccgcgcagtttgaggtaaacctatacgctttattcacatccaatgcctgatatactcgtttgtcttgccaattacggagtagaagtgccaatgaatgccgaaaaaagcccggtaaaccataacgtagaccacgaagagatcgctaaatttgaagccgtcgcctcccgctggtgggatctggaaggtgagttcaaaccgctgcaccgcattaacccgctgcgtctgggctatattgccgagcgtgctggcggtttatttggcaaaaaggtgctcgatgtcggttgtggcggcggcattctggccgagagtatggcgcgcgaaggcgcgacggtgaccggtctggatatgggctttgagccattgcaggtggcaaaactgcacgcactggaaagcggcattcaggtggattacgtgcaggaaaccgtggaagagcacgcggcaaaacatgccgggcagtatgatgtggtgacctgcatggagatgctggagcacgtccccgatccgcagagtgtggtcagagcctgtgcgcaactggtgaaaccaggcggcgatgtctttttcagcacacttaaccgcaacggcaagagttggctgatggcggtggttggtgcggaatatattttgcgcatggtgcccaaaggcacgcatgatgtgaagaagtttattaaaccggcagaattgctgggctgggtggatcagaccagtttaaaagagcggcatatcactgggctgcattacaacccgatcactaatacttttaaactcggccccggcgtggatgtgaactatatgctgcacacgcagaataagtgaggttgatgtttggccgcgccaatgcctgatgcgacgcttgccgcgtcttatcaggcctacaaatgctccccgtaggccggataaggcgtttacgccgcatccggcaaccgtgccgactagacagtgattaccatttcaccgtcatgctcaaaaaccctgccgtctgggcaaaatcatcactccctttctgccacgccacgctgccgcgcagggacactcgctgactgatattgcccgtgactcccacttttatttcaccccgttgcttcaccgcatcgtcactgatagtgctgccatcctcttcaatttccgtgctatggggatcgtgataataattcagatctaatgttggtatgacatgaacagcggtacgccattcgctgtgtaaacccagccgcgtctgaatatcatcaccctggctttgactcacgcgcgcacggttagcggcggtaaaatcatcctgctgcacgccctgataaatcacctgcgcctgcggttcaatcaccacaccacgccccggtaaccactgataccccgcctccaggctggcgataatcccgctgctgtggtaatgatctgtgccatcttcttgttcggaaacatcattgctaaaccacgcgtattgcagccagctatccagccaggccccttgcttctgattaccgtgctgaaaccagctacttgtcagcccaacggcataaccgtggttctggttatcggcgcgagttccggtcatattgctgcggctgtcgccctggttatcgctgtagccaccaacaatcccaagcatccactcgccatccgtgccccagcgcccgctaaacagatcgccgctaagttgcaccgtagaagtgtcttcatgttgagccagttgccccgctgctgtgtaatgataatctccgccgataacacgtaaattcagcgtctgaccatcgccacctgcgtgatcgcgtcgctccatcataaacgcctgatttgccgcccgcaggttattaagataaccgccaactttggcattcaacaccggctggtaagcaggcgtaggttccgggtcgggtgttggatcaggatccggcgtgggatcaggatcgggagtcgggtctggatcaggtgggcttggcggcgttacttcttggcttcgcagataccagtcgttgttatcttccaccagcgtgtagtcatacgctcccatattgacgtagccgctgcctgccagactgaactgcgcattgttttgaaactgcgtgggatcagctgcgaaatcaaccactttaatgcctgtgcttgtcggctcaccaatccctgtaatggagttaaccaccacagttgtgttgccagcagtattaccgttcatcaccaattgatcgcttacgctgtcatcgccgtttaattcgctatcgagcagtagcgtaccgccgccggtataatcaccgtttaccgtcagcgtatcgccagcgacgccattttgcaggctaaccgcaccggacgtattggtcagattgccattaaccgtcacgttggaaagataagtcaggctgtcagtttcaaggttggtattaagctcacctgtcaacgtcacaccatcggtggcattcaccagcgtcccatcgccgttaaatagactggcattaagggcgacggaagtatcctgcccggtcaggcgcaaaaccgtaccatcgctgatgtcgatagtgccgctggaaatagcatcaatactctgaatatcctgatccgcgccagtaacgaacgttgccccatcaccaacccacagactgctagcataaggaaggatatcagcaacatcacctttcagggtgccttcttcgacacgtaccgcgctctgcgttgtaccgctggcggtcagctccagtgtaccagcccccgttttagtcaatgtgctaccctcatcctgatgctgcccgctgctgtcagccatcagtgcgccccactgcgtgtctacccccgcatcaactgccacttcaccgtcggcgcgcatttcaatatcacgtccgtggcctgccgcatcactacgcgtgtcaacgtcggaggtaatctccatcacgctttcttgttgcttatcggtaaagataacctggcggttatagtgggtatctccaagctggctgttgtcgctcaccatcagcgtaccggaggcgatttgtgttgtgcccaaataactattattgtttgccagacttacctgcccgtcgctcgcatcgaccaccacgtagacgccatctttcccgtcgccgccgatatgcaaattgtcgccacctgcaagatctaccacatcctgactgccgataaccgttccgctgctgccactgacttcaaggccatcgttgtaacttgtgccgctctgccaggtggagaaatcagagagatcgagcacaccgccgtttaacacgatgctctgcggatcgtcctggagagcggtaagatctgccgcgtcgccttccaggctaagcaccgcaccatcatcaacgactatatcgccggttagcgccatgctctgcgcccctgccagcacgtagctgccgttttgcgcaatggtgagctgaccagcaccttcgatgatgccagcaaaactgccctgattaacagtaacgttgccaccagcatcgatatttaaagtgccattctgaaagcccgtcaatgcgtgcacaaaagtttgttgggtgctgccaacgtttagctcagcctgattctgatactgatcaatactccctatcgtcagaccgtagcagtcttgcggatcgtcctggcaatgcgtatcgccgacattcatcagggagttgctgcggcccagggtaacttcaccgttttcaatctgcatctcaccagtaaagtcattgttatctgcattaagtaccagatcgccggaacctgttttggtgattaacccggtaccagcaatagagtcaacagctccgtcattctctgtattgccaataaccagcgtttttccgtcggcaatatcaaaggtaacttcacttaagccgagatacataaagccacccgccgcagaggaaggaccatctccatagcctgctgcgctattgttctcatcgactaacacgcctccgttctggctgtagctgtcatcaacagaaatatcaataagatagggagccgtcacgctattggtatatatcgccccgccataaccttcggcagtgttatttgtaaaggcagtgttatttactatcgtataaccactaggatgcttgctgtcgctattattatcggtaacatcgattgccccgccatcgccatcactgtaacttgtacttgtatatgcctggttgttatcaaaaataacatcacttaaataaacgtcattattaatggtataaattgcgccacctttgccatcattagcgatgttattgcgaaacatggcgttagtgacacgtaaatcgacggcaccagtatcgttagtaccagaagaatagattgcgccaccatagccgcctgcgacgttaccggaaaaaataacatcagtaagattcagcgtactgttttctttagcaaatatggccccgccgttattatattctcctgtaacggtgttattggcaaacagagtcattccagtttcattttctggtaatagactaaattccgctccttgttgcaaaaatacggccccaccgctggcgttattggtcatatcgctaaaaaccagccattgcccatcagcgatactccagtcctgcgtaatgccactaaggctttgcctgctggcctgacaactcgctttgacatcatatccctggcaactatcagtgaccgccgcgacaccgttagcagagaaaagagatgcaatcatactcgggagtaaagataaatactccttgcgtagaaagataatccgcatattaatctaaccatcattttctataagacggcgtatttaatcgcattatacgatatggaatatctttcttttgtaaattgttcaacccggtgcaatggctattttgttattatttgatgaataatatcagtgcgtcataattcaagttaataaccttcagggatatcagttatatttaaactaaattaaagtcatgaataattttcttataatataaggtaaattaacaaaatggcttagcatttaacaataaccgaatagaaaacaaccatttcgccatcaacaatctcttacattcgcttatatattgaccacaactgatacatcagattatgtgatgactcgtgcttagatcaatttttgcaatcattagcaaaaagattaataagccatctatatcaatttatctaacctattatgccgttcaagaaatcgccgaacagttatttttaacaaatttttctcttcccattgactttcccggacaccttgtctgacctaaggtgcgcgaaagccactttttccttcctgagttatccacaaagttatgcacttgcaagagggtcattttcacactatcttgcagtgaatcccaaacataccccctatatatagtgttctaagcagcttcccgtactacaggtagtctgcatgaaactattgcggaaagaattccaaaaacaggtacgacatacatgaatcagaatctgctggtgacaaagcgcgacggtagcacagagcgcatcaatctcgacaaaatccatcgcgttctggattgggcggcagaaggactgcataacgttagcatttcccaggtcgagctgcgctcccacattcagttttatgacggtatcaagacctctgacatccacgaaaccattatcaaggctgccgcagacctgatctcccgtgatgcgccggattatcagtatctcgccgcgcgcctggcgatcttccacctgcgtaaaaaagcctacggccagtttgagccgcctgcgctgtacgaccacgtggtgaaaatggtcgagatgggcaaatacgataatcatctgctggaagactacacggaagaagagttcaagcagatggacacctttatcgatcacgaccgtgatatgaccttctcttatgctgccgttaagcagctggaaggcaaatatctggtacagaaccgcgtgaccggcgaaatctatgagagcgcccagttcctttatattctagttgccgcgtgcttgttcagcaactacccgcgtgaaacgcgcctgcaatatgtgaagcgtttttacgacgcggtttccacatttaaaattagcctgccgacgccaatcatgtccggcgtgcgtaccccgactcgtcagttcagctcctgcgtactgatcgagtgcggtgacagcctggattccatcaacgccacctccagcgcgattgttaaatacgtttcccagcgtgccgggatcggcatcaacgccgggcgtattcgtgcgctgggtagcccgattcgcggtggtgaagcgttccataccggctgcattccgttctacaaacatttccagacagcggtgaaatcctgctctcagggcggtgtgcgcggcggtgcggcaacgctgttctacccgatgtggcatctggaagtggaaagcctgctggtgttgaaaaacaaccgtggtgtggaaggcaaccgcgtgcgtcatatggactacggggtacaaatcaacaaactgatgtatacccgtctgctgaaaggtgaagatatcaccctgttcagcccgtccgacgtaccggggctgtacgacgcgttcttcgccgatcaggaagagtttgaacgtctgtataccaaatatgagaaagacgacagcatccgcaagcagcgtgtgaaagccgttgagctgttcagcctgatgatgcaggaacgtgcgtctaccggtcgtatctatattcagaacgttgaccactgcaatacccatagcccgtttgatccggccatcgcgccagtgcgtcagtctaacctgtgcctggagatagccctgccgaccaaaccgctgaacgacgtcaacgacgagaacggtgaaatcgcgctgtgtacgctgtctgctttcaacctgggcgcaattaataacctggatgaactggaagagctggcaattctggcggttcgtgcacttgacgcgctgctggattatcaggattacccgatcccggccgccaaacgtggagcgatgggtcgtcgtacgctgggtattggtgtgatcaacttcgcttactacctggcgaagcacggtaaacgctactccgacggcagcgccaacaacctgacgcataaaaccttcgaagccattcagtattacctgctgaaagcctctaatgagctggcgaaagagcaaggcgcgtgcccgtggtttaacgaaaccacttacgcgaaagggatcctgccgatcgatacctataagaaagatctggataccatcgctaatgagccgctgcattacgactgggaagctctgcgtgagagtatcaaaacgcacggtctgcgtaactccacgctttctgctctgatgccgtccgagacttctagccagatctctaacgccactaacggtattgaaccgccgcgcggttacgtcagcatcaaagcgagcaaagacggtattttgcgccaggtggtgccggactacgagcacctgcacgacgcctatgagctgctgtgggaaatgccgggtaacgatggttatctgcaactggtgggtatcatgcagaaatttatcgatcagagcatctctgccaacaccaactacgatccgagtcgcttcccgagtggaaaagtgccgatgcagcagttgctgaaagacctgctcaccgcctacaaattcggggtcaaaacactgtattatcagaacacccgtgacggcgctgaagacgcacaagacgatctggtgccgagtatccaggacgatggctgcgaaagcggcgcatgtaagatctgatattgagatgccggatgcggcgtaaacgccttatccggcctacggctcggtttgtaggcctgataagacgcgccagcgtcgcatcaggctccgggtgccggatgcagcgtgaacgccttatccggcctacggctcggatttgtaggcctgataagacgcgccagcgtcgcatcaggcacaggatgcggcgtaaaatgccttatccggcattaaactcccaacaggacacactcatggcatataccacctttagtcagacgaaaaatgatcagctcaaagaaccgatgttctttggtcagccggtcaacgtggctcgctacgatcagcaaaaatatgacatcttcgaaaagctgatcgaaaagcagctctctttcttctggcgtccggaagaagttgacgtctcccgcgaccgtatagattaccaggcgctgccggagcacgaaaaacacatctttatcagcaacctgaaatatcagacgctgctggattccattcagggtcgtagcccgaacgtggcgctattgccgcttatttctattccggaactggaaacctgggtcgaaacctgggcgttcagtgaaacgattcattcccgttcctatactcatatcattcgtaatatcgttaacgatccgtctgttgtgtttgacgatatcgtcaccaacgagcagatccagaaacgtgcggaagggatctccagctattacgatgagctgatcgaaatgaccagctactggcatctgctgggcgaaggtacccacaccgttaacggtaaaactgtgaccgttagcctgcgcgagctgaagaaaaaactgtatctctgcctgatgagcgttaacgcgctggaagcgattcgtttctacgtcagctttgcttgttccttcgcatttgcagaacgcgaattgatggaaggcaacgccaaaattattcgcctgattgcccgcgacgaagccctgcacctgaccggcacccagcatatgctgaatctgctgcgcagcggcgcggacgatcctgagatggcggaaattgccgaagagtgtaagcaggagtgctatgacctgtttgttcaggcagctcaacaggagaaagactgggcggattatctgttccgcgacggtagcatgattggtctgaataaagacattctctgccagtacgttgaatacatcaccaatatccgtatgcaggcagtcggtttggatctgccgttccagacgcgctccaacccgatcccgtggatcaacacttggctggtgtctgataacgtgcaggttgctccgcaggaagtggaagtcagttcttatctggtcgggcagattgacagcgaagtggacaccgacgatttgagtaacttccagctctgatggcccgcgttaccctgcgcatcactggcacacaactgctgtgccaggatgaacacccttcccttctggcggcgctggaatcccacaatgtggcggttgagtaccagtgtcgcgaaggttactgcggctcctgtcgcacacgcctggttgcaggtcaagttgactggattgccgaaccgttagcctttattcagccgggggaaattttgccctgttgttgccgggcaaaaggcgatattgaaatcgagatgtgaattggttgtagtgccagatacaacgcttatgcgtcttatctggcctacaacgattacatggcgtagtaatacgctttcacctgctcccagtccgctttggggattggctccagatatttttccagctggcggaagtcatgattaatcgctttatcgcgacgcaagcggcgacgacttttctccaggtcaagaaaaccagcttctgcattaccttctgttttcacatagatatggcgaacataacaacagccatgctgacgattaatgctatgcattttcttaaacgccagcgccactgctttcaacatggcttgccgtacttcgtcagaataagggcttactgcatgctgggcataccagtcagcaatgctgatgaaccccgccatatcttcagtcaccagcaacgctcgccattcaccctcaattttcaccgcttcaccaaaaacgatcttcggcacgatgacaccggcccgttccagttctttaattaccgcaacctcacggacaatcgttggtcggccgaacggataacgtacggaatgaaacagatgatgcgtcatgcgctttacatacagctttttgccgttgcgctcgacgcattgcaccccgctcataccattacggcgatagttaggctcttcaacccagtcgccctctgttgcccaccagtgattaaattcgtcgtactttgcactaactgccataccctatcgcctgtcatttttattaacgacaatgactataggtggttacctgaggaaaatcttaatgaaacgtgtcgtattaatgaatttcttttgccactactagcttgacaccgcttttacccttcatttgcagcgcatagattccaccagccactaccactaatagtgcgcccagcagataaaatgtgaatttaatcaggcggatacagcgatgaattttattcgacagggattaggcatcgccttacaaccagagttaacgctgaaaagcattgcaggtgaattgtgttccgttcctctcgaaccaactttctatcgacagattagcttgctggctaaagaaaagccggtagaaggcagtccactgtttttactacaaatgtgcatggaacaattagtggcgattggaaaaatttgatatgagacaggatggcgcatgaacgccatcctgcagtaacattactctttattaagaaattttactgccttatcagggaaatcagtaaacagcccatttacacccgctttgttatacagagcatcatataactgattcacatcaggagtgtattcaggcagtttatcactccgcacggtataaggatgcactaccagtttattctgctgagcatcttgcaccatgccagtgagtttgatattacccggctggcttgtctcctcaatcaacatatggtaatccggaccaataccatctgcatattccgccacctgtttcatggcacccggcttaaacatccagtcgtagttgtaattaacccagcttccatccggctgtttctgctgcgtttcattccagtcggtataggcaatcagctgtaccagattgagctccatgcccattttgggttccagctcattcttaatacgcttcagctcatcagcatcaaaacattgcaaataaactttatcgtctttaccggtgtaaccatatttcttcagcacttccagcgtttttgccgcaatatccttcccttcctgatgatggaaccacggcgctttgatttctggataaataccgatatttttcccggtagagtgatttaacccctgaacaaattcaatctcttcttcaaaggtgtgcacccggaagtcggacttacccattgggaaacgccccggataagtctgcacttttttaccgttttcaatatcgaaaccttcggtaaatttcaagctcttaatttcatccagcgtgaaatctatcgcgtagtaacgaccgtctttgcgcgcccgatccgggaaacgatcggcaacatcagtaacacgatcgaggtaatggtcatgcagaacaaccagattgtcgtctttggtcatcaccaaatcctgttccagataatccgctccctgcgcatacgccatcgcttttgctggcagcgtatgctccggcaaatatccactggcaccgcgatgggcgatgactattttttcgttgctgtccgccgccattgcactgcttcccatgactatagtgctcatcatgatcgccatgctaaggtttttcagcgtcaatttcatgccattagcctccgttgcgttcttgcagtaattgttcatggcgacgtttttcgccaatcatcacaacaatcaacaagataaccgccagaatgctgccgccaatcattaccataaagccgccatcccagccgaagaagtccacggtgtagccaacaatcgcgctcgccgccacgctaccgcccaggtaaccaaacagcccggtaaagcccgctgccgtacctgccgcttttttcggtgccagttccagcgcatgcagaccgatcagcatcacaggaccgtagatcaggaagccgataacaatcatacaaatcatatcgacggttgggttacctgccgggttcatccagtaaacgatagtcgcgatggtcaccagtgtcataaagaaaacgccggttgccccacggttgccacggaagactttatcgttcatccagccgcacagcagagtgcccggaatacctgcatattcataaaggaagtaggcccaggaggatttatctagcgcgaaatgcttaacctctttcagataagtcggactccagtcgaggatgccgtaacgcagcagataaacgaacacgttggcgatggcgatataccacagcagtttgttcggcagtacgtactgcatgaagatttgcttcgccgtcagctcctgttccgctttttcgttatagtcgtccggataatcatttttgtactcttcgatcggcggcaagccacaggattgcggggtatcgcgcatcatcgcaaaggcgaataatgccaccagaatggcgcagaaagcaggcatatagagcgccgcatgccagtcattgaaccaggccatccccagcaggaacagcagcggcggaataccaccaccgacgttgtgcgcacagttccacacactcacaatgccgccacgttctttctggctccaccagtgcaccatagtacgaccacacggcggccaccccatcccctggaaccaaccgcagaggaacaacagtacaaacatcaccgcaatgctgctcgtcgcccatggcacaaagcccataaacaacatcactgccgccgccagaatcaaacctgcgggcaggaaaacgcgcggattgctgcgatcgcttacgctacccatgatgaatttgctaaatccataagcaatgctgatcccgctaagggcaaaacctaaatcaccgcgactgaatccctgctcaaccagataaggcatagcaagcgcaaagttcttacgaaccaaatagtaagccgcatagccaaagaatatccccaggaaaatttgccagcgcaatcgacgataagtcggatcgatctccgcggcaggtaagcgcgctttgtgtggcgctggtttaaaaatactcaacattgatagcctccgtggcccgtggtcttatttatgattaacagcctgattcagtgagagaacctgccgtttcttgagttgccgcgatgttaagaaaacattcataaattaaatgtgaattgccgcacacattattaaataagatttacaaaatgttcaaaatgacgcatgaaatcacgtttcactttcgaattatgagcgaatatgcgcgaaatcaaacaattcatgtttttactatggctaaatggtaaaaaacgaacttcagagggataacaatgaaaactcgcgacagccaaagtagtgacgtgattatcattggcggcggcgcaacgggagccgggattgcccgcgactgtgccctgcgcgggctgcgcgtgattttggttgagcgccacgacatcgcaaccggtgccaccgggcgtaaccacggcctgctgcacagcggtgcgcgctatgcggtaaccgatgcggaaagcgcccgcgaatgcattagtgaaaaccagatcctgaaacgcattgcacgtcactgcgttgaaccaaccaacggcctgtttatcaccctgccggaagatgacctctccttccaggccacttttattcgcgcctgcgaagaagcagggatcagcgcagaagctatagacccgcagcaagcgcgcattatcgaacctgccgttaacccggcactgattggcgcggtgaaagttccggatggcaccgttgatccatttcgtctgaccgcagcaaacatgctggatgccaaagaacacggtgccgttatccttaccgctcatgaagtcacggggctgattcgtgaaggcgcgacggtgtgcggtgttcgtgtacgtaaccatctcaccggcgaaactcaggcccttcatgcacctgtcgtggttaatgccgctgggatctgggggcaacacattgccgaatatgccgatctgcgcattcgcatgttcccggcgaaaggaagcctgctgatcatggatcaccgcattaaccagcatgtgatcaaccgctgccgtaaaccttccgacgccgatattctggtgcctggcgataccattagcctgattggtaccacctctttacgtattgattacaacgagattgacgataatcgagtgacggcagaagaggttgatattctgctgcgtgaaggggaaaaactggcccccgtgatggcgaaaacgcgcattttgcgggcctattctggcgtgcgcccgctggttgccagcgatgacgacccgagcggacgtaacgtcagccgtggcatcgtgctgctcgaccatgctgaacgcgatggtctggacggatttatcaccatcaccggtggcaaactgatgacctatcggctgatggctgaatgggctaccgacgcggtatgccgcaaactgggcaacacgcgcccctgtacgactgccgatctggcactgcctggtagtcaagaacccgctgaagttaccttgcgtaaagtcatctccctgcctgccccgctgcgcggttctgcggtttatcgtcatggcgatcgcacgcctgcctggctgagcgaaggccgtctgcaccgtagcctggtatgtgagtgcgaagcggtaactgcgggtgaagtgcagtacgcggtagaaaatttaaacgttaatagcctgctggatttacgccgtcgtacccgtgtggggatgggcacctgccagggcgaactctgcgcctgccgcgctgccggactgctgcaacgttttaacgtcacgacgtccgcgcaatctatcgagcaactttccaccttccttaacgaacgctggaaaggcgtgcaacccatcgcctggggagatgcactgcgcgaaagcgaatttacccgctgggtttatcagggattgtgtggtctggagaaggagcagaaagatgcgctttgatactgtcattatgggcggcggcctcgccggattactctgtggcctgcaactgcaaaaacacggcctgcgctgtgccattgtcactcgtggtcaaagcgcactgcatttcagttccggaagcctggatttgctgagccatctgccagatggtcaaccggtgacagacattcacagtggactggaatctttgcgtcagcaggcaccagcccatccttactcccttctcgagccacaacgcgtgctcgatctcgcttgccaggcgcaggcattaatcgctgaaagcggtgcgcaattgcagggcagcgtagaacttgctcaccagcgggttacgccgctcggcactctgcgctctacctggctaagtagcccagaagtccccgtctggccgctgcccgcgaagaaaatatgtgtagtgggaattagcggcctgatggattttcaggcgcaccttgcggcagctagcttgcgtgaactcggccttgccgttgaaaccgcagaaatagagctgccggaactggatgtgctgcgcaataacgccaccgaatttcgcgcggtgaatatcgcccgtttccttgataatgaagaaaactggccgctgttacttgatgcgcttattcctgtcgccaatacctgcgaaatgatcctgatgcccgcctgcttcggtctggccgatgacaaactgtggcgttggttgaatgaaaaactaccttgtagtctgatgcttttgccaacgctgccgccttccgtgctgggcattcgtctgcaaaaccagttacagcgccagtttgtgcgccagggtggcgtgtggatgccgggcgatgaagtgaaaaaagtgacctgtaaaaatggcgtagtgaacgaaatctggacccgcaatcacgccgatattccgctacgtccacgtttcgcggttctcgccagcggcagtttctttagtggcggactggtagcggaacgtaacggcattcgagagccgattctcggccttgatgtgctacaaaccgccacgcggggtgaatggtataagggagatttttttgcgccgcaaccgtggcagcagttcggtgtaaccactgatgagacgctacgcccgagtcaggcagggcaaaccattgaaaacctgtttgccatcggtagcgtgctgggcggatttgatcccatcgcccagggatgcggcggcggtgtttgtgccgtcagtgctttacatgccgctcaacagattgcccaacgcgcaggaggccaacaatgaatgacaccagcttcgaaaactgcattaagtgcaccgtctgcaccaccgcctgcccggtgagccgggtgaatcccggttatccagggccaaaacaagccgggccggatggcgagcgtctgcgtttgaaagatggcgcactgtatgacgaggcgctgaaatattgcatcaactgcaaacgttgtgaagtcgcctgcccgtccgatgtgaagattggcgatattatccagcgcgcgcgggcgaaatatgacaccacgcgcccgagcctgcgtaattttgtgttgagtcataccgacctgatgggtagcgtttccacgccgttcgcaccaatcgtcaacaccgctaccagcctgaaaccggtgcggcagctgcttgatgcggcgttaaaaatcgatcatcgccgcacgctaccgaaatactccttcggcacgttccgtcgctggtatcgcagcgtggcggctcagcaagcacaatataaagaccaggtcgctttctttcacggctgcttcgttaactacaaccatccgcagttaggtaaagatttaattaaagtgctcaacgcaatgggtaccggtgtacaactgctcagcaaagaaaaatgctgcggcgtaccgctaatcgccaacggctttaccgataaagcacgcaaacaggcaattacgaatgtagagagcatccgcgaagctgtgggagtaaaaggcattccggtgattgccacctccagtacctgtacatttgccctgcgcgacgaatacccggaagtgctgaatgtcgacaacaaaggcttgcgcgatcatatcgaactggcaacccgctggctgtggcgcaagctggacgaaggcaaaacgttaccgctgaaaccgctgccgctgaaagtggtttatcacactccgtgccatatggaaaaaatgggctggacgctctacaccctggagctgttgcgtaacatcccggggcttgagttaacggtgctggattcccagtgctgcggtattgcgggtacttacggtttcaaaaaagagaactaccccaccagtcaagccatcggcgcaccactgttccgccagatagaagaaagcggcgcagatctggtggtcaccgactgcgaaacctgtaaatggcagattgagatgtccacaagtcttcgctgcgaacatccgattacgctactggcccaggcgctggcttaaactcctttctgatgcccggtaagcatgtggttaccgggcatttttgcgtacacgattccgtgcccaatgtatgcgttgcaacgcagtgaaaattcctctgaaaacgtctcgcaaaggctgaaactggcagatgtcaaaggcctgggataaccgtaatgtcgcgtcatcataaatatcaggtgacggacaaccatgaccgaaagtacaacctcctccccgcatgatgcggtatttaaaacctttatgttcacacccgaaaccgcacgggattttctcgaaatacatttaccagaaccactgcgcaagctttgcaacctgcaaaccttacgcctggaacccactagttttattgaaaaaagtttacgcgcttactacagcgatgttttgtggtccgtggaaaccagcgacggtgacggctatatctactgcgtgattgaacatcaaagctctgcagaaaagaatatggcttttcggctaatgcgctatgccactgccgccatgcagcgtcaccaggacaaaggctatgacagagtcccgctggtggtgccgttgctgttttatcatggcgaaaccagcccttacccgtacagtctcaactggctggatgagtttgacgatccgcaacttgcccggcagttgtacaccgaagcttttctgttggtggatatcaccatcgtacctgacgatgagatcatgcaacatcggcgtatagctctgctggaactgattcaaaagcatattcgcgaccgcgatttaatcggcatggtcgacaggatcaccacgcttttggttagaggcttcactaatgacagccagctacaaacactgtttaattatctgctgcaatgcggcgatacctcccgtttcacccgttttattgaggagattgccgaacgtagtccactacaaaaggagagattaatgactattgctgaacggctacggcaggaagggcatcaaattggctggcaggaaggtatgcatgaacaagccattaaaattgctttgcgcatgctggagcagggctttgaacgtgagattgtgctggcgacaacccaactcactgatgctgatattccgaactgtcattaaaaggagagattaatgactattgctgaacggctgcggcaggaaggacatcaaattggctggcaggaaggtaaattagaaggtttgcatgaacaagccattaaaattgctttgcgcatgctggaacagggctttgatcgtgaccaggtgctcgcggccacccagctaagcgaagccgatctggcagcgaataaccactaattaacacaggcccacagccgatccccatgggcctttgatatcaataactaccttttatgcgtggcccatttttgccacttttaaacatcgccagtcgttgatccagggcatcgctgtagagcatcgtgtcaacgccaacagcgacaaagttcgctccccacgccaggcattgctgcgccatatcaggagccacagccagaaaaccagccgctttacccgcagcacggatccgccgaatactggtttcaataattcgctgcacttccgggtgcccggcgttatccgggtagcccaagctcgcagaaagatccgcaggtccaataaacacgccatcaatcccttcgacgtcgaggatttcgtccaggttatccagtgccgttttactttccacctgcaccaacagacaaaggctatcgttaacttgcgccatgtaattctcaatgcgtccccagcgcgcagcccgtgccacactggccccgacaccacgctcaccgtagggaggatagcgcgtggcagacaccacctgacgtgcctgttcggcagtatcgaccatcgggatcagtagagtttgcgcgccaatatccaggacttgtttaatcagcggtttactgccttccaccggacggatcacgggttggctggcatagggcgctaccgcctgtagctgatgataaagatcctgaatggtgtttggcgcgtgctccccgtcaatcagcaaccagtcataaccagaagtggcggcaatttctgccatataggcagtcgtactgcttaaccacagaccaatttgcacttcgcccttgcgtaaacgttctttaaagggattgcttaataatgcgttcatcgtgttccttaacctatttaatgatgtgccacgtcggtctgcgcaacagtgcgatttacacgcagagtgaaaataatcaggctaccgatgaccgccaccgctgccagcgtcagtaatcccgccgcatcgctggcaaataacgtttctgctttcacgcgcaggatcggggcaataaacccgcccactgcaccaaacaggtttacaaaaccaattcccgcagccagcgccgtaccggaaagcagttgtgtcggcatcgtccagaacactggctgcacggcaataaacccgatagctgcaacacacagcgctacgatcgccattactggagaaagcagcccggacagaccaataccaatgcccgccgccagtaatgtcagcgctgcgacattacgccgttcgccggttttatcggaatagcgcggaataagccaggtcccaaacaaggccgcaacccacggaatggcggtgaccacgctcgctgtaaagcccacttttgttcccagcaatgccgcaacctgggtcggcaggaagaaaattaatccgtaaaccgccacctgaatggtcaggtagataatcgctagttgccagactcggccattacgcagcgcatcgctcagccgagaagtcactttctgttgttcttcacttgccagttgattgataagcaacgttttttcttgtttactcagaaaacgtgcctgctccggtgtgtcatcaagccaaaagaatgtgaataccccagcaccgactgccaacaatccttcaatcacaaacatccagaaccagccgggatgccccataaatccatgcatctccaacagcgcgccggaaagcggacttcccagtgttaacgccagcggtgcgcccatatagaacagccccataatgctggcgcgattacgctgcggaaaccattggctggtgagataaatcataccagggaaaaatccggcctccgcagcacgaagcagagtgcgaactatcagaaatttcgcttcagtatcggcccatgccatggctgcgctaagaaatccccacagcagtgttgtcgtaccaatccaggttctggcccccagtttgcgcatcaaaagattcgccggaacacccagaaacgcatataccacaaagaaaatgcctgctcccagcgcataagcttcattactcaacccggtatcaatctggtaggtctgtttggcaaaaccgatattgctacggtcgagaaacgccagcacatacagcgccaacataaacggaattaaacgcacacggtttttcttcaccacggcgtcaagcaaagcggtgctcataaaaagctccttagaatatgtgggcgttaccgttgtcacagcaacgcccggagtgattagtggctgtaggggcgtttcaaattgcagtcatgattgagttcgacgccaaaaccgggtttatcaagcacacttttatgaatacgaccattcaccggaaccggctcattgagcagaatcgggtcaaactgcggacgcatcgtactacaatccgggctggtcatcaggaattcgctgaatggcgtattggtgaaggtgatcaccgcatggtgagagtaaacagagctaccgtgcggcaccaccagttgccccctggatttggcgattgcggcaatttccaccagcgtggttaaaccaccgcaccagccaacatccggctgcataatgtcgataccggtttcactaagcgtacgaaaagattgcagtgtgccgtggtgctcaccgctggtgaccatcattccgactggcgcgttgcgtttcagttcgcgataactttcatactgctgtggcggcaggcactcttcgatccatttcaggttatagggcgcgcaagcgtgggccagtttggtcgcatagttcacgtcctgactcatccagcagtcgagcattaaccagaaatcctcaccgcatttttcacgcatatccgcgaccatagcggcatctttgcggatccccgcatcgccatcatgtggcccccagtgcgtcggcattttgccaccgataaagcccatctcttttgccagatccggacgcgcacctgtggcgtagaactgaatctcatcacgaacagcgccgcctaaaagtttataaaccggaagcccgaccactttgccgaacagatcccacagagccagatcgacacaagaaatcgtattcatcaccaggccaccagagccggagtaatacagggtggcactgagcatttgatcgtggatcagtttgatatcactgacacatttaccctcaatgaaacggttaagatgtttttcgacaataaaacagcccatttcaccggctgtgctaacggcgaatccggtctggccgttttctgcttcgacttcaacaaccaacgtgccaagaacgttaatgccaaaactctggcgactctgctcgtaatcgcggtatttactcatcggggtggcaatatgatcgtctatccagtgattcgccccctggtcgtgataatcaccgccgccagcgcctttttctgctgtcgcaccgccagtaaaccaggcgcgaacctgtttaatttttggtagggtcatgatgttctccattgttaactggcttgtaagtcaaagggacttttccatcccaacagacgactaatatccctggcgcaggcaatggccttgcccgccagataatcacggtattcttcattgatttgtaagcgggtaccgaccacgctgatcgcagcggtaagctcgttattggcgttaaacaccggcgcagcgacacaacggacatcggcgtaatcttcgccgttgtcatagctccagccctgacggcgaatacgcgccagttcttcgtgaagttgctgtggatgagtaatcgttgtgggtgtcgcctgctcccagaccagcccttcgataatactttgctgtaccgctgcaggttgccaggcaagcaggcatttacctattccggagcgataaaggctaaggctttttccttcatgggaacgcacgctgatagtggcactactctccactttcaaaatgtaataagcgctgccgttatcaataatccccaggtgacataacagcccggtggtatccatcagttgcgtcaaacgcggtcgagccagttcccggagatccatcttgcttaacgcatgaccggaaagctccaccagcctggtccacaaacaaaaattttcctggtgatcaaggctaagaaaacgctgacgcctgagttcattaagcagcaaataggccgtgcttttagggattcccaatgtgtcaatgatcgtcgcagcactacaggggccaatgcgggcaatcaaattgagaatatcaatagcccgtgtcagggcgggaactttgctactttccaacatactggactccagtcttagatactggaatcagtctcgttgctcagggggagtaaaattgtgaagcgcatcaaatcccgctcctcgtccagcagactggagaaattacgcacaaatttgtgaatcagcgcacggattttttcttattgagtacaacaggttggacaaattttgccggagggggaatgtgccggtgcagtaaaccggcacagagtggcggaatcagacagataaggtcatggactcaacaacctcaatccagccatgctcactggcgatatcctggccgtttaaccaacggcgcagcatattcagtgccatcattgcgcacacttcctgacggatagccaggctgtagcgcgtagtgctgaaacgcacacgcagagcgaaagtgccgtctggcgtggctagcgcaaagttgagatgctcgttctcgaaaccgctaacagccagtgccagcccggcaaaatggttggcccgccgttctgtaatccagtgcgcagtttgcgccagggtttcctcctgactaggaaccacttcacacgccagcaatggagcacctgcgcgagaaagttgcaaagccaataaaccaccggtgaattgctcgctcaacgtcaggctgaactggcggttttgcaattcgcgactgatctgcgcgggcagtccttcagtgccttcgaaaatcacgctctgtccggcaacacgtttaacatccagccacagtttttccatcgcctgttgctcgcttgccggtccggtgagtttcagttcgatgataggcatactggagcgatagcccattgttacgcccggcggcagttgtagagtgtccaggctttgtgccagatcgctttcgctacgaccaaaagtagtcaaacgcagacaaaccggcggctgcggtaaagaaaaacgctcgcgcaggcgcggcaggatttcgtgctcgaccatcaccttaaattcactcggtacgccgggagtaaagaacatcaggcaacgattaagctgcacggcaaaaccacaggcggtgcctaccgggttattgataaattcagcactggcaggcagctccgcttgtttacggttgctcggtgccattactcgtccacgttcgtggaaatagcgttccatctctttgagccaggcttcatgcagcaccaggccttcaccttttgctgtcgcagcggcgagtgcgcttaaatcatcgctggtcggtcccagcccgccgttaacgatcagcacatcggcgtgctgactacgttcgcgaagaatggtgactaagtcatcaaggttatcccccaccgtattgcggcgagataatggcaacccctgatgaaagaaaaaatcggccagccaggcagcgttagtgtcaacgatttgcccgtgtaacacttcatccccggtggataacatttccacttttaacatggttatctcctgcttttgttatcgaatcactataacgcaaagggagataaggcgtagtaagaaactgaatggcgcgacagaatgccgcgccggaagggatcagaaactggcgttaaccccaacatacgggccgtcagccacggcgttgtcgcggttaccgtctttaccgctcagattcaggtagcgataacccgcctcaatactgactggacgcataatggtgtaacgcgcgccagcattcgcttcttcataactttgaataccgctggagaggctatccggagagtagtaatactcgccaaacaaacggaagctgttgccaattttccactgcaaaccacctcctaccgctgcggcataaccttcatcgccgtaattcgggttggtgtaaacgccttttccgccaacggtcgccattaacggcccgagaggcagattcaaccccagccccacgccagcgacatcaccgtcgtcgtcgttatgtgtccagttaccgcttaacgccaggcccgtcgtttcagtcccaaaaccgacaccaatattggtgtattctttacccgcctgaccgctgatgctcattgcattgacgcttgcagaaaccaacagcattccggccagacctgctagcgcaatttttttcattatcccctttcccacaagcaattaatcaaaattcccaaagctgcgggattgtactgcctggcacagaggattcaatgagcgaaaaaaaggatctagtcacttattgtaactaaatacttcttaaataattaaatgccgaaaaaataaacacactttatcgatacacacaaaaataataataagtacagttatcatcgcaaaagagattactgtcactttcacatatttgtgagttaccgtattctcatggtttctttttatttataaggaatatccctgtgcgacaacggactattgtatgccctttgattcaaaatgatggtgcttatttgctgtgtaaaatggccgacgatcgcggcgttttccccggtcaatgggcgattagcggtggcggcgtggagcctggcgaacgaattgaagaggcactacgccgcgaaattcgcgaagaactgggagaacagctgcttttgacagaaatcacgccgtggaccttcagcgatgatattcgcaccaagacgtatgcagatggtcgcaaggaagagatttatatgatttacctgatttttgactgcgtttctgccaaccgagaagtgaaaataaacgaagagtttcaggactacgcgtgggtaaaacctgaagatctggtgcattatgatttgaatgtcgccacccgaaaaacgttacgtttgaaaggtcttctgtaacaatgatgacagccattactggctgtcagattgaaaatttagtggttaacgaattccccatccagataaactttgcctttttccacatgcatgactaaaccatccagataatcaggtttaaatgtcgcgtcacgcttatctttagcaatatatgtcaggcaatgattatgggtgaaaataacgatatttttatcaggcgctttgctttgtaagtccttaattgcactataaatctcattaccgcactgaagaagtcgtttatctaccgtcaattttttacccgcactaaaccaggtagcgctctgaatggtccggacggtattactggaataaagatcgaaatcagggatatcagcactaaaagcgttgcccagttcacgggcatcctgggtacctttaaccgtaatacctgttttatcactcaagcattgattggtactacggtcgcaacgttcagcatgacgaaacaaaacgacaaccgggtgctgctgtgccagtctggccagtgttttattgtcgatacgtggcaaaccattgctactccaggcggcatgagtacccagtccggcaattgcagcgagcgccagtaaaatgatgatatattttttactcttcaagctagagcggcaaaaagctaacacgtaaactccacctatagacaagcgcaaccagacaattaccgtgaaattgagctacatttctggcgataattcgcagttggtgtaatattaaaaatcctacgatgtcggcaaaatgcctcaaaattttgccaaatgcaaagcctaaataagaaaaaatataaaaatttcaatatttacgtctaatattagtttcttaaggttaagttaatattctatccttaaaatttcgctccaaatggcaaaatatacacaacactctttatagcaaatataagtggacaggtattcaatggcggaaggaaaagcaatgagtgaatttttgccttttagccgaccagcaatgggcgtggaggaactcgctgcagttaaagaggttctcgaatccggttggatcacaaccggtccgaagaatcaggcgcttgagcaagctttttgccagttgacgggaaatcagcatgccatcgcggtcagtagtgccaccgccggaatgcatatcacgctaatggcgttgaaaattggcaagggcgatgaagtgattacgccttccctgacctgggttagtaccctcaatatgatttccttgttgggtgcaacgccggtaatggtggatgtcgaccgcgatacgctgatggtcacgcctgaagctatcgagagtgccattacgccacgcactaaagccatcattccggtgcattatgccggtgcgccagcagatattgacgccattcgcgccattggcgaacgttacggcatcgcagttatcgaagatgctgcccatgccgtcggtacgtattacaaagggcgacatattggcgcaaaaggtaccgctatttttagttttcatgccattaaaaatattacctgtgctgaaggtggcctgattgtaactgataatgaaaaccttgcccgccagctacggatgctgaaatttcacggtctgggtgtcgatgcctatgacagacaaacctggggccgtgcaccgcaggctgaagtcttaacaccgggctataagtacaatctgaccgatattaacgccgcgattgccctgacacagttagtcaaattagagcacctcaacacccgtcggcgcgaaattgcccagcaatatcagcaagcactggcagctctcccctttcagccattaagccttcccgcctggccgcacgttcacgcctggcatctgtttattattcgtgtcgatgaacaacgttgtggtatcagtcgcgatgcgttgatggaagcgttaaaagaaagaggcattggtaccgggttacatttccgcgccgctcacacacaaaaatattatcgcgagcgttttcccacgctgagcttaccgaataccgaatggaatagcgaacgcatctgttctttgccgctgttcccggatatgactaccgccgatgccgaccatgtcatcacagcccttcagcaactcgcaggacaataagccatgtttgaaatccaccctgttaagaaagtcagcgtggttattcccgtttataacgagcaggaaagcttaccggaattaatcaggcgcaccaccacagcctgtgaaagcttggggaaagagtatgagatcctgctgattgatgacggcagtagcgataattccgcgcatatgctggtcgaagccagtcaagcggagaacagccatattgtgtctattttgcttaaccgcaattacgggcaacatagtgcgattatggcgggattcagtcacgttactggcgacttaattattacccttgatgccgatctccagaatccgccagaagaaatcccccgcctggtggcaaaagccgatgaaggttacgacgtggtagggactgtacgccagaaccgccaggacagctggtttcgtaaaaccgctagcaagatgattaaccggcttattcagcgcaccactggcaaagcgatgggtgattacggttgtatgctgcgcgcctatcgccgtcatattgtcgatgcgatgttgcactgccatgaacgcagcacctttatcccgattctggcgaatatcttcgcccgccgtgccattgaaattccagtacatcatgccgagcgtgagtttggtgaatccaaatacagttttatgcgcctgattaatttgatgtacgacctggtgacctgccttaccacaacgccgctacgtatgctgagtctgctcggcagcattattgcgattggaggttttagcattgcggtgctgctggtgattttacgcctgaccttcggaccacaatgggcggcagaaggcgtctttatgctatttgccgtgctgtttacttttattggcgctcagtttatcggcatgggattactcggtgaatatatcggcaggatctacaccgatgtccgcgcccgcccccgctattttgttcagcaagttatccgtccatccagcaaggaaaatgaataatgaaaaccgtcgtttttgcctaccacgatatgggatgcctcggtattgaagccctgctggctgccggttacgaaattagcgccatttttacccatactgataatcccggtgaaaaagccttttatggtagcgtggctcgtctggcggcggaaagaggcattccggtttatgcgccggataacgttaatcatccgctgtgggtggaacgcattgcccaactgagcccagatgtgattttctctttttattatcgccatcttatttacgacgaaattttgcagctcgctcccgcaggtgcatttaatctgcatggtagcctgttaccaaaatatcgtggtcgcgcgccgctgaactgggtgctggtcaacggtgaaacggaaactggcgttacattgcaccgaatggtgaaacgtgccgatgccggggccattgtggcgcaactgcgcattgccattgcgccagacgatatcgctattacgctgcatcataaattgtgccatgccgcgcgccagctactggaacagacattacccgccattaaacacggtaatattctggaaatcgcccagcgcgaaaacgaagccacctgttttggtcgcagaacgccggatgacagtttccttgaatggcataaaccggcatccgtactgcacaacatggtacgtgccgttgccgatccgtggccgggtgccttcagctatgttggcaatcagaaattcaccgtctggagcagccgtgttcatcctcatgccagcaaagcacagccggggagcgtgatttctgttgcgccactgctgattgcctgtggcgatggcgcgctggaaatcgtcaccggacaggcgggcgacggcattactatgcagggcagccaattagcgcagacgctgggcctggtgcaaggtagtcgcttgaatagccagcctgcctgcaccgcccgacgccgtacccgggtactcatcctcggggtgaatggctttattggcaaccatctgacagaacgcctgctgcgcgaagatcattatgaagtttacggtctggatattggcagcgatgcgataagccgttttctgaatcatccgcattttcactttgttgaaggcgatatcagtattcattccgaatggattgagtatcatgtcaaaaaatgtgatgtcgtcttgccgctggtggcgatagccacgccgattgaatatacccgcaacccgctgcgcgtatttgaactcgattttgaagagaatctgcgcattatccgctactgcgtgaagtaccgtaagcgaatcatcttcccgagtactagtgaagtttatgggatgtgtagcgataaatacttcgatgaggaccattctaatttaatcgtcggcccggtgaataaaccacgctggatttatagcgtaagtaaacaattacttgatcgggtgatctgggcctatggcgaaaaagagggtttacagttcaccctcttccgcccgtttaactggatgggaccacgactggataaccttaatgcagcgcgaattggcagctcccgcgctattacgcaactcattctcaatctggtagaaggtagtccgattaagctgattgatggcggaaaacaaaaacgctgctttactgatattcgcgatggtatcgaggcgttataccgcattatcgaaaatgcgggaaatcgctgcgacggtgaaattatcaacattggcaatcctgagaacgaagcgagcattgaggaactgggcgagatgctgctggcgagcttcgaaaaacatccgctgcgccatcatttcccaccgtttgcgggctttcgcgttgtcgaaagtagcagctactacggcaaaggatatcaggacgtagagcatcgtaaaccgagcatccgcaatgcccaccgctgcctggactgggagccgaaaattgatatgcaggaaaccatcgacgaaacgctggatttcttcctgcgcaccgttgatcttacggataaaccaagttgacctaagatcttacggataaaccatcatgaccaaagtaggcttacgcattgatgtcgatacctttcgtggcacccgtgaaggcgtgccgcgtctgctggaaatcttgagtaagcataatattcaggccagcatttttttcagcgtcggcccggacaatatgggccgccatctctggcgactggtgaagccacagtttttgtggaagatgctgcgcagtaacgcggcaagcctttatggctgggatattttactggcaggtacggcctggccaggtaaagagattggtcatgccaatgccgatatcattcgtgaagcggctaaacatcacgaagtcggcctgcacgcctgggatcaccatgcctggcaagcccgtagcggtaactgggatcggcaaacaatgatcgacgatattgcacgcggtcttcgcactctggaagagattatcggtcaaccggtaacctgttctgccgctgcgggctggcgtgccgaccagaaggtgatcgaagcaaaagaagcgttccatttgcgctacaacagcgattgtcgtggggccatgccgttccgtccattgctcgaaagtggaaaccctggcactgcgcaaattccggtgaccttacccacctgggatgaagtgattggtcgggatgtgaaagcagaagattttaacggttggttactcaaccgcatcctgcgagataaaggcacgccggtttataccattcatgcagaagttgaaggctgcgcttatcagcataattttgtggatctcctcaaacgcgcagctcaggaaggcgtgacattttgccctttaagcgaactgttaagtgagacgttgccgctcggacaagttgttcgcggaaatattgccggacgtgaaggctggctgggttgccaacaaattgcgggtagtcgctgatgaaaagcgtacgttaccttatcggcctcttcgcgtttattgcctgctattacctgttaccgatcagcacgcgtctgctctggcaacccgatgaaacgcgttatgcggaaatcagtcgagaaatgctggcatccggcgactggattgtgccccatctgttagggctacgttatttcgaaaaacccattgccggatactggattaacagcattgggcaatggctatttggcgcgaataactttggtgtgcgggcaggcgttatctttgcgaccctgttaactgccgcgctggtgacctggtttactctgcgcttatggcgcgataaacgtctggctctactcgccacagtaatttatctcagtttgtttattgtctatgccatcggcacttatgccgtgctcgatccgtttattgcattctggctggtggcgggaatgtgcagcttctggctggcaatgcaggcacagacgtggaaaggcaaaagcgcaggatttttactgctgggaatcacctgcggcatgggggtgatgaccaaaggttttctcgcccttgccgtgccggtattaagcgtgctgccatgggtagcgacgcaaaaacgctggaaagatctctttatttacggctggctggcggttatcagttgcgtactgacggttctcccttggggactggcgatagcgcagcgggagcctaacttctggcactattttttctgggttgagcatattcaacgctttgcactggatgatgcccaacatagagctccgttctggtactacgtgccggtcatcattgccggtagcctgccgtggctgggattactccccggtgcactgtacacaggctggaaaaaccgcaagcattccgcaaccgtctatttgttgagctggacgataatgccgctgctgtttttctccgtcgctaaaggtaaattgcccacctatattctttcctgctttgcatctctggcaatgctgatggcgcattacgctttgctggcagcaaaaaataatcctctggcgctgcggattaatggctggattaacatcgcttttggcgtcactggcattattgccacatttgtggtctccccgtggggaccaatgaacacgccggtgtggcaaaccttcgagagctataaagtcttttgtgcctggagcatttttagcctatgggcatttttcggctggtacaccttaacaaacgtcgaaaagacctggccttttgccgcgctttgcccgctggggctggcgttgctggtaggatttagtattcctgacagagttatggaaggaaaacatccgcaattttttgtcgagatgacacaagaaagtcttcagccaagccgctatattcttactgatagcgtcggtgttgccgcaggtctggcatggagcctgcaacgcgatgacatcatcatgtatcgccagacaggtgagttgaaatacggccttaattatccggatgcgaaagggagatttgtcagcggtgatgagttcgcaaactggcttaatcaacatcgtcaggaggggattattactctcgtgcttagcgttgaccgcgatgaagatatcaacagtctcgccattccgcccgcagatgccatcgatcgtcaggagcgtctggtgctgattcagtatcgtcccaaatgatctggctaacattagtctttgccagcttgcttagcgttgccgggcagttgtgtcagaaacaggcaacctgctttgtggcgataaacaaacggcgcaaacatatcgtgctgtggctgggactggcgctggcttgtcttggtcttgccatggtgctctggctgctggtcttgcagaacgtaccggtaggcattgcttacccgatgttaagtctgaattttgtctgggtgacgctggctgcagtaaaactgtggcacgaaccggtaagcccgcgtcactggtgtggggtggcgttcattattggcggcattgtgatcctcgggagtacggtgtaatgggcctgatgtggggattattcagcgtcattattgccagtgttgcgcaattaagcctgggttttgcggcgagtcatctgccgccgatgacgcacttatgggattttatcgcggctctgttagcttttggcctggatgcccggatactgttactcgggctgctgggttatctgctttccgttttttgttggtataaaacgcttcataaacttgcgctaagcaaagcctatgccttgctcagtatgagttatgtgctggtatggattgctagtatggtacttcccggctgggaagggacttttagcctgaaagcactactgggagtagcctgtattatgagcgggttgatgctgattttcctgcccacgacaaaacaacgttactgagttttccctgccactttacactgccgttcccactcatcggggctataactgcttgcgctgaggactttcaccgtatgcagcttttcacgattaatacaataaagcgcattctgcaaagggctgagtaaatcccccactttcacggcgaagtcactcttcacttcggcgatcatttttatcgcgccgccagcatcgcagagcataagtacatgtctgttatcttgtttattgcagcagctttttttgaccagccattccattgcattatcctgtttgctaagagttttcacatcaatttacagattaacagataaactctttatcaacggcaatggaatggcagaaatgagaagtgaaacggagggttaattattgctgacgttgcacccactcttttagcgcctgacgactaattttaataccgccgtttttcagctccggcggcagagttagccagcgcaccggttgttgaaaacgggccagcttatctttcacccattcactaagatcaacgctctcgtggtcatactccatcaccgccaccggtcgatgaccaaactccttgtcggcaacggggacgataaacacctgcaaaaccgcaggatgtgcagcaattacgcgctcgacttcttccggctgaataccctctccgccactgaagaatagattgtctaaacgtccgacaatggtcagcttgccattatgcatctcaccgcgatcgcgcgtagcgtaccagccttcgtcattaaccagactaaccagttgcccgttacgccagtaaccttctgccatactggcagcccgcagccacacttcattattaacgattttcacttcccgacccggcagcgggctaccaacgtctgccaggccgtcggcttctttcgcacacaccgtggaggcaaactcggtcagaccatagccgcaaaagcaacgaatcccctgctcgcgcgcctgttccgtcaactcgaccgggatagccgcgccgccaagtaacaccgctttcagggaaacggaactacggttaaccagcaaacgccagagttgtgttggcaccagactagcgtgagtacagcctgccagcatttgctccaatggctgtttatcacgtaccgtcatccgcgcaccagcgtataaccagcgccacataattccctgaccggagacgtgaaacagcggtaaagagagcaaccaatcatcgtgatcgccaaacggaatcaggcttaacacaccttgcgcactggcaagatgggcctgataagtatggacagcggctttcggcaaaccggtagaaccgctggtcaacgtcatactgcacagacgcgtcggctgccacgtagcggcatgtgcgccttcaaccagctgaatgtgcaggctcgttaatgccggaaacgtgttttccccatccggcaccagagcaaattgcagcgtcagattgggcagcaattcttcaagcaacggttgcggcagctgagggttcacgggcaacacccgcgccccgcattgcagtaacgccagccaggcgagcagcgtttgcggcgtattccacgcccgcaacatcacgccgctgccctcaaccaccccctgcaccgcaaatccggaggctaattcatcgacgcgagcacaaagctcgcgccagttgagttgctcgtcattaagacgtaaggcgatggtttctccccgcacttgccgccagtgacgccacggccagtcagagaagatcataacaaccgctccagtgcatcaacttccacgacaggcagcgtgctacccggccagcgacgtacctgctgcgcctgcatcagatccagcgtgtccagccctggaatggtgtccggcgttaaccaggcggcaatccgcgccagttgcgttaagcctaagctgctttcaatggaagaactgatcaccgccgtcagccccagcgcgtgcgccgcctgtacctgctcgcgtactttttccagactgcccgtgagcgtgggtttgataactaccgcgcgcacgccctcttcagccacaaaggcaaaatccggctcgcgcaggctttcatcccaggcaatggcaatgccggtttcacgggcaaacgctcggctatcatcgcgggttttgcacggctcttcgagaaacgcgatgcggtcgcgataatccgggttaacgtatttggcaaactgctgacctttcagcggtgtccaggcgcgatttgcgtcaagacgcaaatgcagatccggaattgcctccagcaacagattcaccaccatgccgtcgcgcaccgcttcgtacaatcccactttgaccttcgccactttctcgcctggcatatctgcaagtttgaggatcagatcgtccggatcgccattacacagcggtgccgcacggtagttggctgcttgcggcaacgtatctgtcagttctgccaatgcacagcttacgccaaaggccacggaaggcatctgcggtagctcgcaatcgcctgccagccagttatttacccaggcaagcagcacactttgcgcctcttcccaggtttcctgactgaagcccggcagtggggagatctccccccacccttcgcgctcgccttcacgcaggcaaacatacagcccgtcgcgggtttttaaccgcctgtcgcgcagaaccacccccgcgtccatggggatctgccagcggtatacctgcgcgctacgcattacggattccgtttgaatttgctgaagtcaggctgacgtttctggttgaaggcgttgcgaccttcctgaccttcttccgtcatgtagaacagcatggtggcgttgcccgccagctcctgcagccccgcctgcccgtcacagtcggcgttcagtgcagctttcaggcagcgcagcgccatcgggctgttttgcagcatttcgcggcaccaacggacggtttctttttccagatccgccagcggtaccacggtgttcacaaggcccatatccagcgcctgttttgcgtcgtactgacggcacaggaaccagatttcacgcgcttttttctgcccgacgatgcgagccatgtaggaagcgccccagccgccgtcgaaggaaccgactttcgggccagtctgaccgaagatggcattatctgccgcgatagtcaggtcgcacatcatgtgcagaacgtgaccgccgccgatggagtagccagccaccatcgcgacaaccggtttcggacaggtacggatctgacgctggaagtccagcacattcaggtgatgtacgccggaatcatctttatagccgccgtaatcaccacgcactttctggtcaccaccggagcagaacgctttatcgcctgcaccagtcagaatgatcacgccgatgttgtcgtcataacgcgcatctgccagcgcctggatcatctcttttaccgtcagaggacggaaggcattgcgcacctgcggacgattaatggtgatttttgcgataccgtcggtggatttttcataacgaatgtcctcgaaaccttcggagcagtcgtgccattcaaccggtgcgtaaagcattgcttcatcaggataaatcatattgtgtcctttagtcagaaacgcaagatctgcgccagacttgcgattacgccagcgggattttcccgatgcgcgttatgtccggcgcgaggaatgacatggcagtcggcagccagttccgccgccagggcgcggaatttgctgtcacgttcaccacataaataataaaacgcaaatgtgcgggcgctaaggttagcacgtaaatcaggctggacggcgagagaagtcgcctccagcatggcggcaagcgttgcgccattattgttgctgcgcagcgccaccagctcccggcgttgatcgtcattgagactggcaaaaacaggctgttgataccagtcggcaaataccgccgttaacggttctgtgagaaaacgctgcacccattggcgatcggaacgctgacgttccgcacgttgttcagcattttgcagccccggatgcccgccttcgacaataaccccacaaagccccgccagcccctggcaagccgccatcatcgccacccgtccaccaaggctgtaccccaccagccagaagtcaaggatgttgtaactaaccaaggttttacgcagtaagtcggtgacatcatcaaatccatcgacgctaatcgccgcgctaccaccgtgacctgggagatcaacatacaaccgactgtagtcggcaaacgcctcgcccacttcttgccattcgtggcaatcgccggaaaaaccgtgcaaaaacaccagccagggtaaacctggttttccgtgttttgcctgcgcgtgcaggatcataaatggcttacctgcgccagaagttgctggagcgtttgcgcaccatcggtgtcgttaaccaccatttcaatcaccgtggtggttggcgtgcgccaggcgtcggcaaatgccgtttcaagttcctgccagttttgcggacgatgatatttcagctcgaacatcgcggcggcgtgctcaaaatggacgttttgcggcatcagatagaaacgctcacgctcgctttgcggcgttggcaacaggctgaaaatttgcccgccgttgttgttcaccacaattaataccagcggcgcagaaacctgacgcaataacgccagcgcgttgagatcgtaaagtgcggagagatcgcccacaatcgccagcgtcggtttgccgcttgcccgctgaacgccggcggcggtgctaagcagcccgtcgataccgctggccccacggttgctgtacaccgggtaacctgccggaagttggctaagcgcatcaatcagacgtaccaccaggctgttaccaacaaacaattgcccctgttcaggcagatagtcgcagatgcgatgcgccagttgcgcttcgccaaacgcatcacggcgggcaataaccgcctgcattgcctgttccgccaggcgcgggatttcaacgcaccagggctggcgtttttctgccggatgcagctccagccagtcggcaatattggcaattaagcgacgtccgcgatggtgtgccggatcaagtcgcccttcaatgtcatcaacaatccagtactcttctggttcacagcttgcctgccattgcaggagccgtttccccgtcaggctgcttcccagttgcaccacaatttgcgcctgctgcagctcgctggtcgctttggcattgcctaaccaaagatcggcacacggcagcggctgcccggtttgactcagcacatcgccaatcagcggccagccaagagtttgcgcccacagggcaacttttttgccctcttccgcactcatgcgcccggcaaccaccacgccgcgcttttgtcgccagaagaaccagtcgcgctgtttttcactttccagacgaggcgcttcacgcagccacggtttgtcttcctgccaccagtcacccagacgctgttgccagctaagcccggtatcgtccatttcgccatacagcggttcagcaaacgggcagttgatatggactccccccgcatgaagcgtaccgagagcgtggtcgatggtagaaaccagccaacgtgcggggatatcctgggtcgggcgcggcaaactaatactgtgcgtggggtgagaggcgaacattcccggctggcgaattgcctgattcgcgccgcagtcaattagctccggcgggcgatcggcggttaagagaatcagtttttctccggttaacccggcttcaatcagtgccggatagagatttgccaccgccgtgccggaggtcacaatcaccgccaccggctgcttgctgactttcgccagccccagcgccagatgccccaacccacgctcatcgaaatgggtgtggtgaatgaatgcggaattctccgccgccgctaacgttaacggtgtagaacggctgcctggggcgatacagatgtgtctgacgccgtgacgcgttaatgcttccagaatgaccgccgcccagcgtcggttaaatgcgcttacactcatgagtttgtccggtatcaatattgcggctaagtataaggagctacaaaaatagattattgatatgaatcggtaatgatgcgactcattattattccatttgtaataaagtacgcagccctgccgctttgttgtcgatttcctgccactcttgctcggggtcggaaccacggacaatgcccgcgccagcatataatcgcacgacattgccgctaatttttgcactgcgcagggaaacgcagaattcgctttgttgtaaactgagatagcccgcagaaccggcgtaccattctcgggtgaacggttcgtgacgggcgataaactgtcgcgccagatcgcgcggtaagccagcaactgctgccgttggctgcaactgatgtaaacagatcacatcatccgctttgttgagactagtccagatacagcggcgaagatgctgcactttacgcagacgcagtacctgcggcggtaaaacatccagcgtctgggtatcggcctgtaatcgttgacagatatcttccaccaccagcatgttctcgcgctggtttttatcatccgccatcagccactctcctaactgctgcgcctgcttatcatcaggattatttgctactgttcccgccagcgcttcagtacgcagcgctttgtcacgccgccgccataaccgttccggactagagccaagaaaagcattttcgccatcaaaggccatgtaaaaatggtagcaattcagattcagtcgacgactggcagccatcatcgccgccgcgttgaccggacttgcgaaatgcaggtcagttgcccgagcgagcaccactttgtcgagctcaccttcggcgatggttttcgttgccagttcgattaattgcgtccagcccgttttgtccggccagtgttgttctcgcgtggtggttaaatgtaacccaggcaagggcttgatactcaccagtgtggcgataaattcttttgcctgaatcgcatcgtgctgaagggagctttcgctgaatagcgtcagccgcagcgtggctttaccgccacagcgtcgccattccaggcggggtaaaagtaaattgccctggctcgggtcaaaagcattcagcccccaaatgcgtaagtcggcgtgttccgggtgctggcgaagaaaacgttgtgcctggtccaagctcgtaaaacgggtaatcgcgcccaggacgacagcttcttcatcaccattacgttgttgccagtagaattgcgggtatgtttgctgactggccagccagctcaaggcatcaaaagcgtctttgagagggaaaggaatatcgataacccgaatgccgggtgtcgccggaatctcttggctcaaatggcgcagtagattttccagcgccgtagtaagactttgcacgcggacctctccctgttaaaagcctcacattatacggggtactacaaaaaaaatgcagtaccccggtgtagggaggttttaacggcgtgccagcaacagtcctagtaccagcccaacggccgcgcccacaccaattccttgccagggtttttcgtggacgtagtcatcagcacgataaactgcctgcttcgcccgatagtaataactgtcactagcctggctaacccgttttttcacatcatccagcgctttttctgcacgcgctttcagctcaacatatttctgatcggcgggatcgccagaggagcggagcacctcttccagtgtttcactaagcagcgtcaggtcgtcatcgatacgtgtatcaccaaactgattagacattctcgttctccatttgcgtaaaacctgtcactaactatagacaagggttgttgattacgcctgaattacctcgcgtgccatcccaatgtgtgggataccatcttcttcatagacctccgtcacagggataaaaccgaaactctggtagaagttttgcagatgcgcctgcgccccgaggtaaacaggcttatcaggccagtgatgcgtacatgtttcgagtgttttactcatcagctgctgccccactttttcgccacgcaacgcttcactgacaatcacccgacctataacgaccggctcaagatcatcatcacttttcagaatcctcgcatacgccaccagttcatcatttttccaaccgagaatatggcgattatcccccgtcaaatcatcaccatcgatatcctgataagggcaattctgctcgacaacaaacaccgcgcaacgcagttgtaataaggcataaagctgggaaacgcttaattcagagtgatgcagatcttgccattcaatcataatgctctccttttagatgtatgccttatactagccggaatattttttgaaacgtgatgaactcatggaattaatttttttaggtactagtgccggtgtgccaacccgcacgcgcaatgtcacggcaatattgcttaacctgcaacatccgacccagagcggactttggttgtttgactgcggtgaaggcacccagcatcagctactgcataccgcctttaaccctggaaaactggacaagatttttatcagtcaccttcatggcgatcatctttttggtttacccggcttgctgtgcagtcgttctatgagtggcattatccaacccttaacgatttatggtccgcaaggtatccgtgaatttgtggaaaccgcgctgcggattagcggcagttggaccgattatccgctggaaattgtcgaaattggcgctggcgaaattctcgatgatggcctgcgcaaagtaaccgcttatccgctggaacacccactggaatgttatggctatcgtattgaagaacatgataaaccgggtgcattaaatgcccaggcattaaaagctgctggcgtgccgcctggcccactgtttcaggaattaaaagcgggcaaaacaatcacgctggaagatggaaggcagattaacggcgcagattacttagctgctccagtgccaggtaaagcgctcgctattttcggcgataccggcccctgcgatgccgcacttgacctggctaaaggtgtcgatgtcatggtgcacgaagcgacgctggatataaccatggaagccaaagccaatagtcgcggccatagctctacacgccaggctgcgacactagcccgtgaggctggagtcggcaagctaatcattacccacgtcagcagccgctatgatgacaaaggttgtcagcacctgttacgtgaatgcaggagtattttcccggcgactgaactggcgaatgatttcaccgtgtttaacgtttaactctgcttattattaaaaacagggcgaaacttgccctgttatcgcaacccgcgctacatatatccacccacacaggcatattgagcgatttttgatatttattcatctccttacgcactatattcagagcaataagttgcctcttttcatcttgattcagcacaacctttgcaactaaaaggagcccatgatggttacagttgtcagcaattattgtcaattatctcaaacgcaactcagtcagacatttgcagaaaaatttactgtgaccgaggaattactgcagtctttaaaaaaaacagcgttatccggagatgaagaaagcattgagttactgcataatattgcgttaggttatgataaatttgggaaagaagctgaagatattctttaccatattgttagaaccccaacaaatgagaccctaagcattatccgacttatcaaaaatgcttgtttaaaattatataatctggcacatatcgcaaccaactcccccctcaaaagtcatgatagtgatgatctcctgttcaaaaaactattctcccctagcaaattaatgacaattatcggtgatgaaattcctcttatatctgaaaaacagagccttagtaaggtgcttttaaatgatgagaataatgaactgagtgatggtacaaacttctgggataaaaatcgtcaattaaccacagatgaaatagcttgctatcttcagaagatcgccgctaatgcaaaaaatactcaagtcaattatcctactggtctctacgtcccctactccaccagaactcacctggaagacgctctcaatgaaaatattaagagcgatccaagttggccgaatgaagtccagttattccccataaatactggcggacactggatattagttagcctacagaaaatagtaaataaaaaaaataataaactacaaataaaatgcgtcatattcaacagtttgcgtgcactaggctatgataaagaaaatagtcttaagcgtgtcattaatagttttaattctgaactcatgggagaaatgagcaataataatataaaagttcatttaaatgaaccagagataatatttttacatgccgatcttcagcaatacttaagccaaagttgcggtgcatttgtgtgcatggcagcccaggaagtgattgaacaaagggaaagcaattctgacagcgccccctatacgttattaaaaaaccatgctgacagatttaaaaaatatagtgcagaagagcagtacgaaattgattttcaacatcgactggcaaacagaaattgttatttagataaatatggcgatgcaaatatcaatcattattatagaaacttagaaataaaacacagtcaacccaaaaatagagcatccggcaaaagagtgagttaacatcattgttaattaattcgaccagtcagcaaatatgctgactggtcgaacatagtttgctaaacagtcatcactgactgatgtcagtcacaccatccgccagttcaatcaggcgaataaattccgccctgtaaccctgtggatcttccccttttgcctgctgagcccactgtttgatctgctgccaggaggtattgttcaggtattcagaaccgcgtaacttttgcccatatgcagctactgctgcgcgaaaacgcatatcttcagagggcgcgtttattgttggccccagcgggaattcaactaactgactttcttttccctgcgggtatttccagcgaatttttaaccaggccagttctttcgttttgtcgcttttcgctaatttgttatccggggcatagcgtaacttatcaatacttgctttttgcccgttcagcgttaattcgaataacaacgttatatgtttgcctgcgcctatatcccctgcatcaacgttgtcgttattaaaatgttccacccgaagttggcgcttttcataaccaatctgacggtattccgttacccacgcggggttaaactcaatttgcgctttgacatcttttgctacggtaatcaacatctgccgcatttcactattcaatactttctgcgcttcagagagggtatcaatgtagctgtagttgccgttaccaacatcggcaattcgcaccatcattgcctcgttgtaattgctattccccacgccaaacgtgctcagagtaacaccagactcccgctgttttttgaccatactttcaatgctttttggatcgtcaatgccaacgttaaagtcaccgtcagtggctaataaaatgcgattgatgccgcccttaataaaccccttcgtcgcctgctgataagccagttccagcccggcaccgccattggtactgccttcggcatccaggctatcaattgcggcattaatttccgccttatgactcccggagatagaaggcaatgcaatacgggagtcgccagcgtaggtcacgatggcaatgttatcctgctcacgaagttctttgaccaataatttcaagctagactggataagtggcaaacgttcatcagaaatcatactaccagaagtgtcgataagaaagaccagattagaagctggtaactcttcacttttgcgatctttcgccaggatatcaactttcagcaatgttcgctgttcattccatggtgcaggtgccaattcgtagcgcatagcgaaaggtattggcttagaggccggaatagattgtttgtctttgatatcccaatcagacgggaaataattgactatctcctccacccgcacagcgtctggcggaggtaacagcccttgattgaggaaacgccttacattcgcataactgccagtgtcaacgtcaagactaaacgtcgccaacggattttgcgctacctgcttaaccggattatcatcgaactgctggtagcgagcggttcctggatttgcgatatgtgtagcttttgctttagccgctcttgcaaatgttggcgcttcctgcaatcgcccctgtaaagcctgtttgtcactatattgttgcacttcttgctgggccaaggctttcgcggcggcggcgctttgctcagcctcttttattgcagcttgctgcgcggcaagcacttgctgctctgtgggagtactgggttgttgttgctgactttccttattctcaggttgcggcccacatccactcaaaatcaaactactcataagcaacatgattatatttttatttcgcatataaaatccttttaaataaactcaggcaccagacataaaatatactctttgtataatcctgctaatcttaataaaatacaatatcgaaacccatagcaaataatgattcaacaacgcaacccattaataatttgcatatgaaaaaaataatctttgcttttattatattatttgtgtttttactccctatgattattttttaccaaccctgggtcaatgcattaccgagtacgccccgacacgcaagtcctgagcaattagaaaaaacagttcgttatcttacacaaactgtgcatccacgtagtgccgacaatattgataatctgaataggtccgcagaatatataaaagaggtctttgtcagtagcggtgccagagttaccagccaggacgtccccattacgggtggcccctacaaaaacattgttgctgattatggtcctgccgatggaccgctgattattattggtgcgcattatgactctgccagcagttatgaaaacgatcaattgacctatacgccgggcgcggatgataacgccagcggtgtggcaggattactcgaactggcacgtttgttacatcagcaagtaccgaaaacaggcgtgcagctggtcgcctatgcgagcgaagaaccgcccttctttcgtagcgatgaaatggggagcgcggtgcatgcagctagccttgagcgtccagtgaaattaatgatagcactggagatgattggctattacgactctgcgcctggaagccagaattacccttacccggcaatgtcctggctttatcccgatcggggagactttattgccgtggtcggcagaatacaggatatcaacgccgttcgtcaggtaaaagcggcattgttgagttctcaggatttatctgtttattctatgaataccccagggtttattcccggtattgatttctctgaccacctgaattattggcaacacgatattcccgccataatgattactgacaccgctttttatcgtaataaacaataccacttgcccggtgataccgcagacagattgaattatcagaaaatggctcaggtagtggatggtgttataactttgttatacaacagtaaataataaaaatttctcgaggcgggtccagaaaaagcgacatgcacattttattttccctcatctgttttaagatgcgaaacatgaaattcaacggaggaaaaataaatgggaatgattggctattttgcagaaattgacagtgaaaagattaaccaactgcttgagtctactgaaaaacctttgatggataatatacatgacacgcttagtggattacgccgactggatattgataaacgctgggattttttacactttgggctgacaggcacctctgcttttgatcccgcgaagaatgatccgctgagtcgtgccgtgcttggtgaacacagcctcgaagatggcatagatggcttccttggattgacctggaatcaggagttagccgcgacaatcgaccgactggaaagtctggatcgaaatgaactgcgtaaacagttttccattaagcgactcaatgaaatggagatttatccgggagtgacctttagtgaagagttagaggggcaactctttgccagcatcatgcttgatatggaaaagctgattagcgcgtatcgacgtatgctgcgacaagggaatcatgcgctgacggttattgttgggtgatatagcttgatgcctgggggagaaagacccattagttaagatttacgccaggatcatcttgaaaaaatctttaaccatggtccggtttttatccccttgtataaatattactaaatgcttgcttagtcgcattgttaaatgcaataccgtatattcggtatgtaacagcgatatcctctgtgctggcaacgatctgtcatgcttgatgaaaacggaattgaacctgtcattaccaggtagataaaaagcctgttcaattttgggattattttttataactcgtgtctgttatggcgacacgggaaaacatcaatattgtccttcacaaattgcagtaatatagaatcaacctctcttgcaagttggtcacaatgtattataagcattttgaatatgtcatcctctgtaatctcgtgaaaattttcggccttgtcttttagctcatcatatcggattcttgcagtaaccattttttgggcgagttctaataaccccaaagcttgcaattgctggtgagtatgatcactttcaaaaaatatcccacactccattccttcccaaccaacatattcatgccattcataaaccagcataaatgtttgtaaaactggcggtaataattggatatctgcaaaaccaaaccaaaacttacgcttgagatcccactcatattcaatcgccaatgctatattgtttaaggcatctccggcatccttatttttacgcaaaatcaattccgtcagtgtatagcgttgttcatcaatacgccgaagagcttctgcaatatcatagtttgtagccaacaaaacattctctgcttcctgatgagtgacgtctgcttttgccgtcaatatattgatttggtcaatatgaaacaacttgatggcttcatcaacatcaccgccagtcctctctaacaaacgtctggcaacctggataccgacaggtacgttcttccgaagtttacgaatttcacttaaccattccatgtcaaacccctttaaatatttatgatattaaatataacaacgtctggataacgacccggcctgactgaatatctcacgttttcctgcttaacattcatgttatgatgctcttgaaactaataatacgtatggaattgtcactatttatctgctaatgaatagtaacaatgtcattcgtttgatgaatatattatttcagggaataattatgacacctttagaacgcattacccaacttgttaatatcaatggtgatgttaataatcctgatactcctcgtccattgttatctcttgaggatttttttattgacaataatatccatggtagtatatgttgcaatgtgattccagaacaatctccgcaagctatctatcaccattttctgaaaatacgtgagcgtaacaatgttagtgatgttttggtagaaattacgatgttcgatgacccagactggccctttagtgaaagtattttagttatcaccactgctagtccagaagaagttcagagctggtttgtagaagaaattgcccctgatgagtgctgggaaggatggagtgaagatacggagcatggatgggttgaagtccctgtgggtatgcatccggttacttgttggtgggattaaaacatttatataaacagataagcggatgtttacataaatttttatgtgaaggaacatgatgaaacttattcctcgcagtagtgatattagtcctggcattgatggaatttgcccggggccttttcctccgaacggatttaccgtacttacagatgcagcatatggtaacggagactgtttcggtttgtactggcctattggtcaggagcataaactacctatagtgtgcgaaacgtaccatgacgaatggcgaatcgtacctgccttttccagcattaagaagttcgaagaatggctggaagtgaatgatgatgatccccatgaaaatggcatcagcatcgaagatcaagactttgcagcaaatctcttccgtgttgctcggaaatgtcttagtacgggaaggcttgatgacgcactgccactgttacagcgagcaacagaacaattgcctgaagtcagcgaatattggttagcactggcaatccagtatcgccgatgtaaaaaaacagaagctgcagcacaggctgcgcttaatgcttatcttggcaattgggcatttggtgttcctgacaataaagtcattcatttgctgagtcaggccgcagatgtcccgaatttccaggatgatcctgtgattcagtgcattaaagaacaaggattagatcttagctttggaggaacaaaggaaaataataattaccccttgatgcagatgtgtgttgatacttattttgcgcagagaaaaccgcttcaggcattaaccctgttacataattatgcctggataatgtccagtgaaacgactgcatttcaggaacgctatgattttaatatcgatgaatggcgggcaaaattcaggcagttatgtttagagtattttggcgatagtcgtacacagttcacttaacgctctgcgtctatctactatcccttctttttcagaaaaaccgccgagcatgtcggcggctttctgacttacaaagtaacagattacatcagcggcattgccaaacgcacaatgctaatcagcggttgtggccatacacccagcaccagtaccaacagtgcagagatcagcacaacgataccgcccgcgctgtactgccagttacttggtgcatcgcgacccggttgttccggggcgtgaagatacaggctcaccgccacgcgcaggtagtagtagaggccgattgcgctaccgacaaccacggcacccaccagccaccacaagtgtgcctggacaccgaccgccagcacgtagaacttaccgataaagcccagcgtcatcgggataccggccagagacagcatcatcaccgtcatcactgccgcgaggatcggacgatgccagaacagaccgcggtaagagaacagggaatcagcatccgggccacgatacgggctggacatcaggctgaccacgccgaacgcgccgaggctgctgaacagataaccggccaggtaaacccctaccgcttccatgctcatctcgccggtttgcagcgcaatcagcgctaccagcagatagccgaggtgagagatagaactgtaaccgagcagacgtttgatattggtctggctcagcgccatcaggttaccgaagatgatggaggcaaaggcgataatcgccagcaccacgcgaatcgcttcgctgtcacccaccggtgcgtagaggaacagacgcatcaccacaccgaagatagcgattttgctcgccgtcgccaggaaagtggaaaccggcgcaggcgcgccctggtatacgtctggcgtccacaggtggaacggcaccagagagagtttgaagccgaggccaacaatcatcaggccgaaacctgccagcaacagcggctcgttgagcataccgtcgccaaggtttttacccaacgcgacaaagctcaggtcgccagactgcgcatacaccagcgccataccaaacagcaggaaagaagacgctgcggcagaaaggatggtgtatttgatactggcttccagactacgtttctggcggaaagcgtaaccgaccaggccaaacagcggcaaagagatcagttcgataccgaggaacagagacgccagatggttggcattcgccagcaggatcccgcccagcgcggcaattaacaccaacaggtagaactcatccttgttgtcgttatagccttcaagccacgggtaggcgaaagtacaggtggcgaggctcgccaacaataccagcccggtgtaaagcatggcgaaaccatcaacgcgcatcagcggcgtaacgtccatagcgcccgcctggccaacaaaccagagcgaaaccagcgccgcgttaagcccaataaccgagagcgtagcgttgaggaaatgattgcgtcgccacgcaatggagagcatcacaaccaccaccgtcaagccgacgatcagcaacggtagcagtgcgatcaggttttgtggagttattgtcatggcgatttacggccttgtagtagtaacggaattaacaaaccactgctggatattgccaatcgcggagtggctggtatccagaatcggctgcggatagaagcccagcagtaccagcagcaccaccagcaacaggatcataaacagctcacgcaggctcatccctggcagttcctggctggcaatctggcttttcgctttaccgaagtaagcgcgatgtaacatcgccaggctataaacagatgcaaagaccagcccaaaggtagagataacggtaatcaccggtacaacctggaagctgccgaacagaatcataaattcgccgacgaagttaccggtgccaggcatcccaagcgttgccaccgcaaagaacaggctcagtgctggcagccatttcatcttgctccacagaccgcccatcatgcgcatgtcgcgggtatggatacgttcataaagctgaccacaaagaataaacagacccgccgcgctcaaaccgtgcgcaatcatctggattaccgcgccctggtaggccaactggctgccggtgtagatagcaatcagcacgaagcccatgtgggaaacgctggtgtaggcgatcagacgtttgatatcggtctgggcgaaggccatccacgcaccgtagaagatgccgataacacccagccacatagcaattggcgcgaactctgcgctcgcgttcgggaacagcggcagggagaaacgcagcaaaccgtaagcggcagttttcagcaagatccccgcgaggtcaacggaaccggcggtcggagcctgggagtgcgcatccggcagccagccatgcagcggaaccaccggcattttgactgcgaaggcgatgaagaagcccagcattaacaggtattccacaccactggacattggcgtattcagcagctcttcatagttgaaggtccagacgccggtcgcattgtagtgaacaaaaaccagcgccaggatggcaatcaacatcaccaggccactcgcctgggtgtaaatgaagaacttggttgccgccgtgatacgcgttttaccgtcagaggctttatgcccccacagtgcgatcaggaagtacatcggcaccagcatcatttcccagaagaagaagaacaggaacatgtcgatggcaaggaacacgccgataacgccgcccaggatccacatcaggttgaggtggaagaagccctgatatttttcgatctctttccagctacatagtaccgccagcacaccgagcagaccggtcagcacgaccatcagcaggctcagcccgtcaatggcgagatgaatagagataccaaaacgcgggatccacggcatgtcgaattcagactgccactgcggaattccggcggattgcgtcagactataaccgccctgcaaccacagttgcaggctcagcgccagcgtcaatcccatggtgatcagcgcgatccagcgtggcaccttgacgccaaagcgttcggtctgccagcacaggaagccgccaataaagggaattaatattagccagggtagtaacatggcgatctttattccttgtaaaagtcccgtcaggaccggattttcaacgaattctcacgacagaaaattctcttcggactgggggtagtgtcggatgcaccgcgaaggcggcttatccgacctacgttcttatatgcccaggggcaatcccacaatccttaactcaacgcagtaccatcaacagtgccagcaccacgaccgcaccgatgctcatggatgccacataccagcgcagatagccgttctcacttaacagcagacctttacctgcaaagcgggaaaggacagccgggatgttcatcatactgttcagcggatcgcgtttcagcaaccaggcaatacccaggaacggcttgacgaacactttgtcatacagccagtcaaatccccaggcgttgtaccaccaggtgcccagcagacggcccggcgcactgttggcgatggaggtcaccagagtacgtttacccagccacagccaggctgccagcagaatgccgaccaccgcgaccacgccagaggtaatttccagggtcaacatgctgccgtgcgccagttccgtcgtttgcggaagcacgccctgcagcggcggtacaatcagtgcgccaacgaaggtggaaaggatcagcagcacaatcagcggcaggctgtgagttacccctttcacggcgtgagcgtgaatttgttcttttccgtggaagacgatgaaaatcatacggaaggtgtagaggctggtcataaacgcaccgaccagacctgccaccatcagattgatatgaccattcgccatcgcacccgcgaggatctcatccttactgaagaagcccgcagtgaccagcggtagtgcgctcagtgctgcgccgcccaccaggaagcagagataaaccagcggaatagatttacgcagaccgcccatcttgaagatgttctgttcgtgatggcaggccagaatgacggaaccggatgccaggaacagcagcgctttaaagaacgcgtgggtcatcaagtggaaaatcgccgcatcccatgcctgcacgccaagcgcgaggaacatgtagccaatctggctcatggtagagtaagcgagaacacgtttgatgtcggtctgtaccagcgcggcaaaaccggccagcagcagcgtaaccgccccgacaatacccaccagatgcagaacttccggcgtcatcaggaacaggccgtgggtacgggcgatcaggtagacacccgcggttaccatggttgcggcgtggatcagcgcggagacaggcgtcgggcccgccatcgcgtcggcaagccatgtctgcaacggcaactgcgcagatttaccgaccgcaccgcccagcagcatcagcgtcgcccacatcagcatgttattgccgtcagcaaagtgcgctggtgccagttccaccatttcgcggaagttcagggtgcccagttcgttgtaaagaatgaacagtgcgaaagcgaggaacacgtcacccacacgggtcacgacgaacgctttcattgccgctgcgccattcttcggatcggtgtaatagaacccgatcagcagataggagcacaggcccacgccttcccagccgaggtacatcagcagcaggttgtcggcaagcaccagaaccaccatgctggcgatgaacaggttggtgtaagcgaagaagcgagagtagccctcttcaccgcgcatataccaggaggcgtacatgtgaataaggaaacccacaccagtgaccacgctgagcatggtcaggctcaggccgtccagcaccaggttaaaaccgatgttaaagtcgcctacgctcatccacgtccacagcggctggctgtatgtctgctcgccgttagcgaagaaatcaacgccgataaaggcggttaccagcgccgccaggcccacagagcctacgccgacgatcgcgctgacgttttcagaccagcgcccacgggagaatgccagcaggacgaagccaatcaatggcaaaataatggttaaggcaagcatgttcatccgcgcatctcacttacactatcgatgttcaggttctggcgacgacggtgaagttgcagcagcagcgcaaggccgatactcgcttctgccgccgcgaggctgatggcgagaatgtacatcacctgaccgtcggtctggccccagtagcttccggcgaccacgaaggccagcgcggaggcgttaatcatgatttccagaccaatcaacataaacagcagattgcgacggataaccagaccggttaagccaagaacgaataagattgccgcgaggatcagtccatgttgtaaggggatcatgcgtgctcctccgtttttcttttcgcgctgtcgtctttacgattgctcagcacttcacccgcacgctcttcacgaccgacgtggaaggccacaaccagacctgcgagcagcagcatagaagccagttccaccgccagtacgtaaggcccgaacagcgtaatacccactgctttagcactgattggcgtaccgtcgataccctgatcgttaacaccgaggatggcgtaaacaatcaccaccagcatgatggcgctcaaaattgccggaccaatccacacctgcggtttcagccactggcgttcctgttcgatttcactaccgcccaggttgagcatcatcaccacgaacacgaacagcaccataatggcacccgcgtagacgataatttccagcgcaccggcgaagtaagcgcccagactgaagaacaccccggaaatcgccagcaggctaataatcaggtacagcagtgcgtgtaccggattggtatgggtgatcactcgcaaggtcgcaagtatggctatcaggccacagatataaaaagcgaactccattgcccctctccttacggtaacaggctcttgacgtcgataggcttggcttcgttctctgcttcgcccttatctttgccgtcgattgccatacctgccatccggtagaagttatattccgggtatttgcccggaccggagatcagcagatcctctttctcgtaaaccagatcctggcgcttgtattcccccatttcgaaatccggggttaactgaatcgccgtggtcggacaggcttcttcgcacagaccacagaaaatgcagcgactgaagttgatgcggaaaaattccgggtaccagcgaccgtctttggtttctgctttttgcaggctgatacagccgaccgggcaggctaccgcgcagaggttacaggctacgcaacgctcttcgccgtccgggtcgcgggtcagaacgatacgaccacgataacggggcggcagatagaccggctcttccgggtacattcgcgtttcgcgtttggcgaacgcgtgcaggccgatcatccagatactacgaacctgggtgccgaaacctactaacaattcttttaaggtcatggtcttattgccccttattgcgcctgccagagaatgacagccgccgttaccagcaagttgatcagcgtcagcggcaggcagattttccagccgaaggacattacctggtcataacgcggacgcggtaagctcgcacgaatcaaaatgaacatcatcataaagaacgcggttttcagcgcgaaccagatgaatggcggtaacaacgggccttgccagccaccgaagaacagcgtcaccatcaatgcagagatggtcacaatcccgatgtactcacccacgaagaacagaccgaacttcataccggaatattcaatgtggtaaccatccgccagttcctgctcggcttccggctggtcaaacgggtgacggtgacataccgccacgcccgcgatggcaaaggtaataaaaccaaagaattgcgggataacgttccacacatgcgcctggctgttgacgatgtcggtcatgttgaaactaccggcctgcgccaccacgcccatcaaggaaagcccgaggaacacttcgtagctcagggtctgcgcagaagcacgcatcgcacccagcaagctgtatttgttgttactactccagcccgcaaacagcaccgcgtaaaccgccagacctgccatcatcaggaagaacaaaatcccgatgttcaggtcggcaaccacccaacccggactgactggcacaatcgcaaaggccagcagcaggctggtaaaggcaatcatcggtgccagggtaaagatgacgcgatcgctgaatttcgggatccagtcttctttaaagaacattttgatcatgtccgcaaccagctggaggctaccgccccagccaacacggttaggtccgtaacggttctggaacagacccagcaggcgacgttcgccaaagctcatgaatgccccgcaggtgacaaccaccagcaggatcaccaccgctttgaggatggtcagcaggatctcaatcagttccggacttatccaactcattgttgtgcctccttgagatcctcaagatgcgcgccagccagcaccggagcaatgccggacatacccatcggcaagcccacctgccctgccgtcagtccttcggcgatttcaaccggcagcgtgaccgtgttgccatcgtaactaaaggagacgcgtgtacctgcgttcacacccaacttcgcggcatccgctgggttgagtttgatgtacggctgcggcatacggctctggaagaccggagcacgctgactcaattcatcgctgccaaacaggtggtaatacggcgcgatacgccatttcccgtcctgcggctggaagcgtgccggtacgctggtgaagtaatccagaccattttcgctggtttcaaacagacgcacgcccggatcgccaaagcgcagtttgccgcccacttcgtcctggaatttgttccacgcctgcggggagttccagcccggcgcccaggcaaacggcacttggctacggtgcgcagtcggctggttgttaccttccatgctgaaggtgaacatggtgtcaatatcctgcggctgacgcggctcatgaacgctgatattggcgcgcatggcggtacgaccgctgtaacggtgcggttcacgggccagtttctgcccacgaatacggaatgtcgcatccggcgcagcatctttgatacctgccagttccgggattttcgccacaacagcgtcaatcacatggtcgagctgcgtccagtccacttcacggctcagcagggtgctgtgcaggctgtgtaaccagcgccagctttccagcatgacagttttgctgtcgtaataagcaggatcgtaaacctggaagaaacgttgggcgcggccttcgttgttgatcaccgtaccgtcgctttcagcaaagctggcagcagaaagtaccagatgggcgttttccataatcgctgtgcgttgatgatcaaccaccatcaccagcggtgctttagccagcgcagcattcacgcggatagcagaagcgtgacgatgcagatcgttttccaacaccaccaccgcgtcggcgcgtccggtttccagttcggttaacgcttcttcaaggctaccgccacccataatgcccagccccatgctgttgacggaacgggcaatcatggtgataccgacgtcagcgccgcgacctttcagggctttcgcgacgttagccgccgcctgaatcacctctaagctaccggcgttcgtcccggagataatcaacggtttcttcgcacctgccagtgcctgcacgatgacgtcgattttgctttgcagctcaggttcgataccgtcaaccgctggtgcagagttatccagcgcatgggcgatggcaaaacctaaacgcgcctgatcttcaaccggtgcgcggtaagtccacgccgcgatatcatccagacgggtgtcatcaacgttggtaacaaacagcggatgcttcgcacgttgaccgatgttgaggattgccgcaatctgccagtcagccactttctgtgctgccgccatttcgcgcgctttacctttcacagcctgacgcactgccagcgcgacgcgcgcgccggtctgggtaacgtcttcgcccagcaccagtaccgcatcgtaagattcgatttcgcgcagagccggagtataaatgccgccttcacgcagcactttcagcgccagttgcagacgttcctgctcaccgtgagcgataccggtgtagaagttttcttcgcccaccagttcacgcagcgcaaagttgctttccacgctggcacgcggagaaccaataccgatcactttcttgctctgacgcagaatatctgccgcgccctgcattgcctgttcggcgttgagggtaatgaaatcatcgccacgacgctgtactggctgacgcggacgatccttcaggttgacgtaaccgtaaccgaaacgaccacggtcgcagaggaagtagtggtttaccgtaccgttgtaacggttttcgatacgacgcagttcgccgtaacgttcaccggggctgatgttacagccgatggaacattgctggcagatgctcggcgcaaactgcatatcccatttacggttgtaacgctcggagtgcgttttgtcggtaaatacgccggtcgggcaaatttcgaccaggttaccggaaaattcgctttccagcgtgccgtcttccgggcgaccgaagtagacgttgtcgtgcgcaccgtaaacgcccagatctgtaccgtcagcgtaatctttgtagtaacgcacacagcggtagcaggcgatgcagcggttcatttcgtgagagatgaatggccccaaatcctgattacggtgggtacgtttggtgaaacggtagcgacggaagctgtgtccggtcatcacaatcatatcctgaagatggcagttaccgccctcttcacataccggacagtcgtgcgggtggttggtcatcaaccactcgaccacgctttcacggaactgtttcgcttcttcgtcgtcaatggaaataaaggtgccatcggaagccggtgtcatacaggacatcaccaggcgaccacgcgtgtcttccgcgttttggtattgcttcaccgcacactggcggcaagcaccgacacttcccagcgccggatgccagcaaaagtaaggaatatcaaggcccagagacagacaagcttccagcaggttgtccgctccgttgacctcgtattctttgccgtctacatgaattgtagccattagcatgcttccagttttctcagtcagagactgagcgttaatcgaaattcggttaccagcgctctttcagcaggttcggctgaatcccattaatcaaatgggtattgctgaacggctgtttgattcccgcctcaaattcttcgcggaaatatttgatggcgctctgtaacggctccactgcaccaggtgcgtgggcacagaaagttttacccgggcctaagaatcgacacagttgctcaagtgtttcgatatcgcccggctgaccttcaccacgctccagcgcacgcagaattttcacgctccacggcagaccgtcgcggcacggcgtacaccagccgcaggactcacgggcgaaaaactcttccaggttacgcaccaggctcaccatgttgatctcatggtcaaccgccatcgccagcgccgtacccagacggctgcccgctttaccgatactttcgaattccatcggcagatcaaggtgcgcttcggtcaggaagtcagtccccgcgccgcctggctgccaggctttaaatttcagaccatcacgcataccaccggcgtaatcttcgaggatctcgcgtgcggtggtgccgaacggcagttcccacagtcccggatttttcacccgaccggagaagcccatcagcttggtgccagcatctttacttttgctgatgttctgataccactccacgccgttagcgaggatcgccggaacgttacacagggtttcgacgttgttgacacaggtcggtttaccccatgcgccggaggttgccgggaagggtggcttgctgcgtgggttagcacgacgtccttccagggagttgattaacgctgtttcttccccgcagatgtagcgccctgccccggtatggacgaacagttcgaaatcgaaacctgttcccataatgtttttgccaagcagacccgcttcggtggcttcggcaatggcacggcgcagattaactgccgcttcgatatattcgccacgcaggaagatgtagccacggtaagctttcagcgcaaacgcggagatgagcataccttccaccagcaggtgcggcagttgctccatcaacaggcggtctttataggtgcccggctccatttcatcggcattacacagcaggtaacggatgttcatggattcgtctttcggcatcaggctccatttcaggccagtgctgaagcccgcgccgccgcgccctttcagaccagcgtcttttacctgattaacgatttcgtccggagacagcccggtcagcgccttacgcgcgccttcgtaaccgtttttgctgcggtattcgtccagccacactggctgtttgtcatcgcgcagacgccaggtcagcggatgcgtttcgggagtacggataatgtttttcatttataccgctccagcagttcagggatcgcttccggggtcagatgcgcgtgagtgtcctcatcgatcatcatgtttggccctttatcacagttccccaggcagcaagttggcagcagcgtaaagcggccatcaaatgtcgtttgccctggtttgatgttcagctttttctcgagcgccgcctgaataccctgataaccgttgatatgacagaccacgctgtcacaataacggatcacatggcgaccaaccggctggcggaagatctgactgtagaacgttgccacaccttcgacgtcgcttgccggaatacccagcacatcggcgatcgcgtggatcgcaccatccggcacccagccacgctgcttctgaacgattttcagcgcttcaatggacgccgcacgcgggtcttcgtagtggtgcatctcgtgctcgatcgcttcacgctctgccgcactcagctcaaaagcctcggtttgtggttgttgattctcgtgcataattagcggtccacatcactcataacaaaatcgatactgcccagataaacaatcaggtcagacaccaggctgccgcggatcgccgccggaatttgctgcaaatgcgcaaagctcggggtacgaacacgggtgcggtaactcatggtgctgccgtcgctggtcaggtagtaactgttgatccctttggtcgcctcaatcatctggaaagattcattggcaggcatcaccggaccccagctcacttgcaggaagtgggtgatcagggtttcgatatgttgcagcgtgcgctctttcggcggcggcgtggtcagcgggtgatccgctttgaacgggccttccggcatgttgttgaggcactgctcaagaatgcgcagactctggcgcagctcttccactttaagcattacgcgggtgtagcagtcagaaacgccaccacccaccgggatttcaaagtcgaagttttcatagccagaataaggacgcgccttacgcacgtcgaagtcgatcccggtagcacgcaggcccgcgccagtggtgccccactccagcgcctctttcgcgccataggcggcaacgccctgggaacgacctttcagaatggtgttttgcagcgccgctttctcgtaagacgccagacgtttcggcatccagtcgaggaactcacgcagcaggcgatcccagccgcgcggcaggtcgtgcgctacgccgccaatacggaaccacgccgggtgcatacggaaaccagtgattgcttccaccagatcgtaaattttctgacgatcggtaaaggcgaagaacactggcgtcattgcgccgacgtcctgaataaaggtgctgatatacagcaggtgactgttgatgcggaacagttcggagagcataacgcgaatgacgttaacgcgatccggcacggtgatcccggccagtttctctaccgccagcacgtaaggcatttcgttaacgcagccgccgaggtattcgatacggtcagtatacggaatgtagctgtgccaggactggcgttcgcccattttctccgcaccacggtggtggtaaccgatgtctggtacgcagtcgacaatctcttcgccatcgagttgcaaaacgatacggaaagccccgtgcgcgctcgggtggttcggaccgaggttgaggaacatgaagtcctcgttttcggtgccgcgcttcatcccccactcttccggtttgaaggtcagggcttccatctccagatcctgtttggctttggtcagctcaaacgggctgaattcggtagcgcgcgccggataatctttacgcagcgggtgacctttccaggtttgcggcatcatgatgcgtcgcaggttcgggtgaccgtcgaaagtaatgccaaacagatcccaggtttcacgctcataccagttagcgttcgggaacagtttggtgaaggtcggtacgtgcaggtcgttttctgccagcgccaccttcagcatgatgtcgcggttacgatcgatagaaatcagatggtagaaaacggaaaaatccgcggcaggtaacccttcgcggtgtgtgcgcagacgttcgtccatgccgtgtaagtcaaacagcatgacgtaaggtttcggcagtttctttaagaaatcgccaacttccagtaattgttcacgcttgatccacacaacgggaaccccggtgcgagtcgcctgaacagtaaaggcatccggcccaaaacggttgcgcagttcgccaatcaccggatcatcaagatgatcgcgggtctgccaggcgggttcttgcgcggttaagtcggtcatattgttcaccattgcaaatggtccgtggtgactgtcggcgcagtaagcttcgcgaaatagatttaggaataagcgaagaaaaatccctttgccgacaggcgcaaattaaatctcgtcaggtgtacgcaggttagttacggcaatgcgttcaccgcgcttgcgttcgcgctcactttgcatattggcgcgataaacgccctgatcgccaaccacccaggagagcggacgacgttctttgccgatagattcctgcaacagcatcagtgcctgcatgtacgcttcaggacgcggcgggcagcccgggatatacacatcaaccgggatgaatttatcgacgccctgcacaacggaataaatatcgtacataccaccagagttggcacaggcacccatactgataacccattttggttccagcatctggtcatacagacgctgaataaccggtgccattttggtaaagcaggttcctgcaaccaccatcaggtcagcctgacgcgggctagcacgcaatacttctgcgccaaaacgcgccacgtcatgcaccgcggtaaagctagtcaccatctcaacgtaacagcaggaaagaccgaagttatacggccaaatactgtttttacgaccccagttaaccatgtcattgagcttgcccataaacacgtttttgttaacttcttgctccagagggtcggttacgatctcctgcttttgcagggggtaacggtcgttctcaccgttgggatctatgcgggtgagcgtataatccatcttaatgcctcgcggttagcgttgacgattagcgatactgttcgtttccgggttcatacgctcgcggcgactacgcgcgggcgtccagtccagcgcgccaatacgcaccagataaaccagacctgccagtaacacaaaaataaaaattgcagcttccacaaagcctacccagccgctttcgcggatagaggtactccatgcgaacagatacagcgcttcaacgtcgaagataacgaagaacatggccaccagataaaacttggcggacaggcgtaagcgggcggagccgacgctgtcgataccggattcaaacggcacgtttttgctcctcgcgcgtgcgcgaccgcctaaaaaccaaccgcctaccagcatcaggcaacacaggccaatggcaacgataagaaagatagcgaatgcccagtgatgagcgatgacttcagtggatgtactcatactcattgcttactcatcaaaagtagcgccagattcactgctcttcacggcagatggacgccacatcgattcatggggaggaataaaaaaaaccttacaatcactgtagaaattcttttatacagctaattgatgtggttttttactcctttctataaccttttgtcaactttaacaaaagtttcttcacattagtttacataatatcaacaccattagcatttaatgccctttcaccccagatccttgacgactccaggataattagatgttgttgaatcgtgtccgttgtgaagcaatggaaaaaatacgggtctattttgacaggaatttgtgtcgattcctccccccaaaagagagtattttcttgatctgtgacacgcttttgtcattccataacaaaaacgcagcaacaaatttacgtattttttaacatcattgtagcaggtgatttttttcaggcgattatttgtgcgttcgggacgtgaatctctggtggttgaaaaatgaacagttttgtacgttctgcactatgcgatgaaggatttttactaaaaaaaagccgctggggtttaaaacacccccagcggctcgttttttacactattgtctcaggaattatctatcgtccgtcgattactcgatatccctttcaatcaacaaactatcatccccttccggagcagacattgggctgtattgccacggattatggtagctctccatcgcctgatagatcacctgggccagctcattattactggacggatcatagcacagcaaatattcggtatcaggtagcggcggtaagccatctactccactcagcacacgcaggtccgggctcatcatctcaaccggccttgccgtcacgccaagaccggctttcactgccgcacgaacggccggaagcgtgctggcgacataagccagtcgccatggaatatctgctttattaagcgtcgccagcaccatatcgcgaaacgggctaggatcatccagcaatacaagagggatcggctcgcctttttgcaatatgtattccgctgcgcagtaccagtgtgttgggctggtacgcaggttcaatgccttaaacgcactaggacgatgggtggttaccatcaaatccacttcctgggattccagcatttctgccatataggcattacgtttaacgcggacatccagcgctaatttcggataaacgctactcacgcgatttaacaggaaaggtaagatcgtatcggcagattcatcactagcaccgatagttaatacgccctgaagattactgaacattaaactactgcaggcctcatcattaaaacgcaggattttcctggcgtaaccaagaagttgaatgccatgttcagttaacagtttgttgcgaccgtgacgagcgaacagttctttcccaacgagttgttccagacgctgcatttgctgacttacggcggactgagtacgacacacagcggcagctgcggcagcaaaagtgttcagatcggcaacagcaacaaatgttctcagcagatcgaggtcgaggttaattatcggacgatttgcacttatcatatattatcacttactggcggctcatactgagctggttaatgctgtgcacacacaaacaagcaattccatttgtaatgtgcctccctggcagtttcatccggaacccggacgaaagtaaaaatgcatatgagttgcactaaaaaagcgactcacattgttccgttataatgcctgaagtagatcacagaatatatcttcagggatcgcatatctattaagttactcactcttttctatttatgacatgcgcgtgtttgtataaatgtaaatgtgagtccttgttccactctcgtgcagcatcgctggtcatacgcgaacacgtaccaacagcaatggtgaggcggcatcaagagcagggatccgtcatttatccgagcattttaccccaaaaaccttttatttataagggtcattgcgaattatctgatgcaaagttatgttatgttaggcaaagtaatcttctattattaataagcacatcaaaacctttttgaatattaaataataattaattagcatcatcctcattcattaattccgcttaacaatagtttcacaccttgcccccattgcgacacctcggaaatcatcacgcagttaaactctccgtaatgaggaaatatcatcatcgcgtttcattagtgaattcttaaatgaggcattttcacacaattatcttacagataaaaaaaccagacttacaattaagaatcagaacaattcactatataacattgcatgtaaagcatatacacctcattattttgtcattattaagttattaacagcacaatcgagccttcccctctggcaaaatcttattctgcagaccttcaaaacaccgtcctgggggagtacattgttctaagctgacttccacggcagggagtggcgataacagcaaaaaaggtcaagattcatgtcccccattgaaaaatccagcaaattagagaatgtctgttatgacatccgtggtccggtgctgaaagaagcaaaacgcctggaagaagaaggtaacaaggtactgaaactgaacatcggcaacccagccccgttcggttttgacgcgccagatgaaatcctcgttgacgtgatacgcaacctgcctaccgctcaagggtattgcgattccaaaggtctttactccgcgcgtaaagccatcatgcagcactaccaggctcgtggcatgcgtgatgttaccgtggaagatatttacatcggcaatggtgtaagcgagcttatcgttcaggcaatgcaggcattgctgaacagcggggacgaaatgttggttcctgcaccagattacccactctggaccgcggcggttagcctttccagcggtaaagcggtgcattatctttgcgatgaatcctctgactggttcccggacctcgatgatattcgcgctaaaattacgcctcgtacgcgtgggatcgttattatcaacccaaataacccaaccggcgcggtatattccaaagagcttttaatggagattgtggagattgcacgtcagcataatctcattatcttcgccgatgaaatttatgacaaaattctctacgacgacgctgagcatcacagtattgcgccgctggcacctgacctgctgaccattacctttaacggactgagcaaaacgtaccgcgttgcaggcttccgtcaggggtggatggtgttgaacgggccgaaaaaacacgccaaaggctacatcgaaggtctggaaatgctggctagtatgcgcctgtgtgctaacgttcctgcgcaacacgccattcagaccgcgctaggtggttatcagagcatcagtgaatttattacccctggcggtcgtctttatgagcagcgtaaccgcgcgtgggaactgatcaacgatattccgggcgtttcctgcgtgaaacctcgtggtgcgctgtatatgttcccgaaaatcgacgccaaacgctttaacattcacgacgatcagaaaatggtgttggatttcctgttgcaggaaaaagttctgttggtgcaagggacggcattcaactggccgtggccggatcacttccgcattgtcacgctaccgcgtgtcgatgatatcgagctgtctttgagcaagttcgcgcgtttcctttctggttatcatcagctgtaatcttaatttcactgccggagattgcatccggcagcgttatcccgccacaatgacctgatgatgtcatcatacgtaaggtcactatgaaacagagccatttttttgcccatctctcccgcctgaaactcattaaccgctggccgctcatgcgcaacgtgcggacggaaaatgtgtccgaacacagtttgcaggtagcgatggtcgcccatgcgctggcagctatcaaaaatcgaaaatttggcggtaatgtcaacgccgaacgtatcgctttactggcgatgtaccacgatgccagtgaagtgctcaccggcgatctccctactccggtgaaatacttcaatagccaaatcgctcaggagtacaaggctattgaaaaaatcgctcagcaaaaactggtcgatatggttccggaagagctgcgggatatctttgcgccgttaattgacgagcatgcatatagcgatgaagaaaaaagcctggtgaaacaggcagatgcactgtgtgcatatctgaaatgtctggaagaactcgcggccggaaataatgaattcttgctggcaaaaacgcgactggaagcgacgcttgaagcgcgtcgcagccaggagatggactacttcatggaaatatttgttcccagcttccatcttagcctcgatgagattagccaggatagtccgctgtaagcagccggagtctgcgtcgcatcaggcaataagcgccggatgcgacatcaggctcttgtcaaaacggaaacagcatcgggatcatcaccacacaaaccgccatcacgataatggtgaacggtacccccaacttcacaaagtcactgaagctgtaatttcccggacctaaaaccagtgtgttaacaggactagaaaccggtgtcataaaggcggcggatgctgccatcgccacgaccatcgcgaatggataagggctcacccccatcgttttggcagcagccagcgcaatcggagccatcaacaccgccgtcgcggtattagagataaatagcccaataaccgcgctcaagacaaacaaacaccccagcatcatatgtggcccgtaaccaccgccaatgtccatcagccctttcaccgccagcgcgacacctcccgttttctgtaatgccacagcaaacggcatcatcccaacgatcaaaataatgctcggccagtgaatggatttataggcgctttcagcatctatacagcggaatttccccatcagcaggcaggcgatgatagcggcaacaggattaggaatttcatctgtcagcattaacgccaccattagcaccagacagaaaatggcatggggtgcctggctgtgcgcgggacttgcttcactcacctcttccggtaagttcagcgctacgaagtcgcggccctgtttggccagcataccgatcagtttccagttacccacaaccaggatgatatcgcccagcagcagaggctcatccgccaggctaccttccagcgccacgccattgcgctttagccccaccacattcagtccgtagcgggtacgaaaaccaatttcgcgcacgcttttaccaatcagttcactctcaggaattaaactaatctctgccatgcccacatcaagggcctggtcagaaaaatactcgccgcgcagtaccatcggctccagcaattgctcactacaaaattgccggagatcgacatcagccgcagacatatcaataagcaaaacgtcacgcgcgcgaaattcagaaaccccattaacgttcacgataacgcgacgaaaacgccgccagcgttcaacaccgatgacgttagcgccataacgctcacgtaatttgagatcatccagccgttgaccaatcattgggcttccggggcgaatagccagacgtcgcgcacgcccggtcagtcgatattcacggataagatcgcgaaaggttcgacgcgtccagccttcgcgctgcggggtctgggtatcccctttcagcatgaaacgcatcactaacatatacaaaatacccagcaccagcacgaccaggccaataggtgttacgctaaagaaactgaagccgtgatagccttcacgcagcaattcactgttgactaccaggttcggcggcgtcgccaccagcgtcatcatgccgctaatcagcccggcaaaacttaacggcatcatcagacgactcgggctcgtttgcatacgcatggcaacgcttaacaccacgggaataaagatagcgacaacgccggtactactcataaacgcgccaagccccgcgacggtcagcatcaacaaaaccaacattttgatttcactattgcccgcaactttgaccagccatgttcccattacggtggcaacaccggtacggaccaaaccatcgccaataataaacaaggcggcaatcaggacaacgttaggatcagaaaagccggaaaatacttctgggactgtcagcgttccgcttaatgcaaacgcgacaataacaaacaaagcgaccgcatccatacgcactctgcccgtcgcaaacaagacgatggcaacggccagtaaactaagaacccaaatcaattcaccgttcacaacttatccttgttaattgagggggatgacttgattctgccataaaaaagccccgacgagacggggctaaatcatgatcaggtgtttcactgaataataacatcgccatttggctgtttggtcacagtaatttgctccagactgtggaggaccaaatcgacctcattcaggcgcggggtatctgccggagcgttaaccgcaatgacatgacaacccgccgccaggccagaaagcacgccagcgggagcatcttccaccaccacacactcctgcggcgcaagccccagcagctgcgcgcctaacagatacgcatcaggttctggttttccgcgcttcactcgctcagcggttacaaacacctctggtgcgggaagcccagctattttatggcgcgctcgcgctaccggcatggagccagaagtcacaatggcccacggaatacctgctttattcaaatgactgagtaaggcgattgcccccggaagcgcggtaataccttcggtttccgtggcctcgatgtgctccagacgcgtaaactcggcggcaatatcagcctcggatttgcccgccataaaatggcgcagagaggtgatcgcctgtttaccgtgaatgaaagccagcacctcttccggcgctaacccatgacgtctggcccagttgctccacgcccgttctaccgcaggcagggaatccaccagcgttccatcaagatcaaacagaaaacctttgcaccgcacgcgggcctcctcaggcattgataatttgattaatttcgttggcgctcaaatggtactgacgcgggcaggcatgccacacattaagcatgcgctgatatttttcccacattggcgtctgggcgttaaaaccgtgagttccggcgtcaaaatgggtatagcgcccttccacattaaccataaagcggacataaccgaggtaacgtgcttcagtggcggcgtcaaagccgaggaaggtgacacgacgttcatcgatggattgctggtcctgcaaattagaccaggaaacatgcaacgcatgatacatctccataatgtcgatgatagtgcggcaggtttcttctttcagctcgccaaactcgcgatccaattcacgcatctgtaatccgtaaccacgctcaataattgtttgcaggcgacggtaacgttcagcatttgccggatcgagcatagtcatcatcttgtactgattagacaaaataagacgttgcgcgttggtcatttccattgttgactcctgtatcactctactacggtgaaaaaaaagaaggctgagtatgccttcttttatatgcgtaatcaggggtcaattacaaatcatcaaggaaagttttatccagttgtttgaaggcgcgcttaagcgtgtcagctaatgcctggtaatcaggcttgccttcaacgggtgccaacacctgtccagactcctgcaatttaccgcgaacttcataaaaccagttaaggattgcagggggtaatggcgtgacagaacgcttgcccagccaccacaatccctgcatgggtaaacttaaggcgaacagggcagtggcaactgccggcccaagctgaccgcccagggcaatctgccagcagagagtaaatacggcgatcggcggcataaaacggatcgcataacgcgtcatcttgataacgcgattttcgacaaagaccggggcaaggcgtttttccagcggccacgtcttactgtaatgctgtccccggcgaaacaagctaaaaaaattaacagaacgattatccggcgtactcatgcttcacctcaacttcacatataaagattcaaaaatttgtgcaaattcacaactcagcgggacaacgttcaaaacattttgtcttccatacccactatcaggtatcctttagcagcctgaaggcctaagtagtacatattcattgagtcgtcaaattcatatacattatgccattggctgaaaattacgcaaaatggcatagactcaagatatttcttccatcatgcaaaaaaaatttgcagtgcatgatgttaatcataaatgtcggtgtcatcatgcgctacgctctatggctccctgacgtttttttagccacgtatcaattataggtacttccatgagcagtaagttagtactggttctgaactgcggtagttctagtctgaaatttgccatcatcgatgcagtaaatggtgaagagtacctttctggtttagccgaatgtttccacctgcccgaagcacgtatcaaatggaaaatggacggcaataaacaggaagcggctttaggtgcaggcgccgctcacagcgaagcgctcaactttatcgttaatactattctggcacaaaaaccagaactgtctgcgcagctgactgctatcggtcaccgtatcgtacacggcggcgaaaagtataccagctccgtagtgatcgatgagtctgttattcagggtatcaaagatgcagcttcttttgcaccgctgcacaacccggctcacctgatcggtatcgaagaagctctgaaatctttcccacagctgaaagacaaaaacgttgctgtatttgacaccgcgttccaccagactatgccggaagagtcttacctctacgccctgccttacaacctgtacaaagagcacggcatccgtcgttacggcgcgcacggcaccagccacttctatgtaacccaggaagcggcaaaaatgctgaacaaaccggtagaagaactgaacatcatcacctgccacctgggcaacggtggttccgtttctgctatccgcaacggtaaatgcgttgacacctctatgggcctgaccccgctggaaggtctggtcatgggtacccgttctggtgatatcgatccggcgatcatcttccacctgcacgacaccctgggcatgagcgttgacgcaatcaacaaactgctgaccaaagagtctggcctgctgggtctgaccgaagtgaccagcgactgccgctatgttgaagacaactacgcgacgaaagaagacgcgaagcgcgcaatggacgtttactgccaccgcctggcgaaatacatcggtgcctacactgcgctgatggatggtcgtctggacgctgttgtattcactggtggtatcggtgaaaatgccgcaatggttcgtgaactgtctctgggcaaactgggcgtgctgggctttgaagttgatcatgaacgcaacctggctgcacgtttcggcaaatctggtttcatcaacaaagaaggtacccgtcctgcggtggttatcccaaccaacgaagaactggttatcgcgcaagacgcgagccgcctgactgcctgatttcacaccgccagctcagctggcggtgctgttttgtaacccgccaaatcggcggtaacgaaagaggataaaccgtgtcccgtattattatgctgatccctaccggaaccagcgtcggtctgaccagcgtcagccttggcgtgatccgtgcaatggaacgcaaaggcgttcgtctgagcgttttcaaacctatcgctcagccgcgtaccggtggcgatgcgcccgatcagactacgactatcgtgcgtgcgaactcttccaccacgacggccgctgaaccgctgaaaatgagctacgttgaaggtctgctttccagcaatcagaaagatgtgctgatggaagagatcgtcgcaaactaccacgctaacaccaaagacgctgaagtcgttctggttgaaggtctggtcccgacacgtaagcaccagtttgcccagtctctgaactacgaaatcgctaaaacgctgaatgcggaaatcgtcttcgttatgtctcagggcactgacaccccggaacagctgaaagagcgtatcgaactgacccgcaacagcttcggcggtgccaaaaacaccaacatcaccggcgttatcgttaacaaactgaacgcaccggttgatgaacagggtcgtactcgcccggatctgtccgagattttcgacgactcttccaaagctaaagtaaacaatgttgatccggcgaagctgcaagaatccagcccgctgccggttctcggcgctgtgccgtggagctttgacctgatcgcgactcgtgcgatcgatatggctcgccacctgaatgcgaccatcatcaacgaaggcgacatcaatactcgccgcgttaaatccgtcactttctgcgcacgcagcattccgcacatgctggagcacttccgtgccggttctctgctggtgacttccgcagaccgtcctgacgtgctggtggccgcttgcctggcagccatgaacggcgtagaaatcggtgccctgctgctgactggcggttacgaaatggacgcgcgcatttctaaactgtgcgaacgtgctttcgctaccggcctgccggtatttatggtgaacaccaacacctggcagacctctctgagcctgcagagcttcaacctggaagttccggttgacgatcacgaacgtatcgagaaagttcaggaatacgttgctaactacatcaacgctgactggatcgaatctctgactgccacttctgagcgcagccgtcgtctgtctccgcctgcgttccgttatcagctgactgaacttgcgcgcaaagcgggcaaacgtatcgtactgccggaaggtgacgaaccgcgtaccgttaaagcagccgctatctgtgctgaacgtggtatcgcaacttgcgtactgctgggtaatccggcagagatcaaccgtgttgcagcgtctcagggtgtagaactgggtgcagggattgaaatcgttgatccagaagtggttcgcgaaagctatgttggtcgtctggtcgaactgcgtaagaacaaaggcatgaccgaaaccgttgcccgcgaacagctggaagacaacgtggtgctcggtacgctgatgctggaacaggatgaagttgatggtctggtttccggtgctgttcacactaccgcaaacaccatccgtccgccgctgcagctgatcaaaactgcaccgggcagctccctggtatcttccgtgttcttcatgctgctgccggaacaggtttacgtttacggtgactgtgcgatcaacccggatccgaccgctgaacagctggcagaaatcgcgattcagtccgctgattccgctgcggccttcggtatcgaaccgcgcgttgctatgctctcctactccaccggtacttctggtgcaggtagcgacgtagaaaaagttcgcgaagcaactcgtctggcgcaggaaaaacgtcctgacctgatgatcgacggtccgctgcagtacgacgctgcggtaatggctgacgttgcgaaatccaaagcgccgaactctccggttgcaggtcgcgctaccgtgttcatcttcccggatctgaacaccggtaacaccacctacaaagcggtacagcgttctgccgacctgatctccatcgggccgatgctgcagggtatgcgcaagccggttaacgacctgtcccgtggcgcactggttgacgatatcgtctacaccatcgcgctgactgcgattcagtctgcacagcagcagtaatctcgtcatcatccgcagctttgcgctgcggatatctgaaccggaaataatcactatttccggttttttattctcttaatttgcattaatcctttctgattatcttgcttaactgcgctgcatcaatgaattgcgccatcccactttgcatacttaccactttgttttgtgcaagggaatatttgcgctatgtccgcaatcactgaatccaaaccaacaagaagatgggcaatgcccgatacgttggtgattatcttttttgttgctattttaaccagccttgccacctgggtagttccggtggggatgtttgacagtcaggaagtgcagtatcaggttgatggtcaaacaaaaacacgcaaagtcgtagatccacacagttttcgcattctgactaacgaagcaggcgaacctgagtatcaccgcgtacagctgttcacgacgggcgatgaacgcccgggcctgatgaacttcccgtttgaaggattaaccagtggaagcaaatacgggacagccgttggcatcatcatgtttatgctggtgattggcggcgcgtttggcattgtgatgcgtacaggaaccattgataacggtatcctggcgcttattcgccatacccgcgggaatgaaattctctttattcctgcgctgtttattctgtttagtcttggcggcgcggtatttggtatgggagaagaggccgtcgcctttgccattatcatcgcaccgctaatggtccggctgggctatgacagtattaccaccgtcctggtgacctatattgccacgcaaatcggttttgccagtagctggatgaacccgttttgtgtggtcgttgctcaggggattgccggcgttccggtgctttctggctccgggttgcgtatcgtggtgtgggttatcgccactctgattggcctgatctttaccatggtgtacgccagtcgagtgaaaaagaatcctcttctgagtcgcgtgcatgagtccgaccgcttctttcgtgaaaagcaggctgatgttgaacaa
